(19) United States
(12) Patent Application Publication
(10) Pub. No.: US 2018/0216167 A1
(43) Pub. Date: Aug. 2, 2018

(54) GENETIC TESTING FOR PREDICTING RESISTANCE OF STENOTROPHOMONAS SPECIES AGAINST ANTIMICROBIAL AGENTS

(71) Applicant: Ares Genetics GmbH, Vienna (AT)

(72) Inventors: Andreas Keller, Puttlingen (DE); Susanne Schmolke, Erlangen (DE); Cord Friedrich Stahler, Hirschberg an der Bergstrasse (DE); Christina Backes, Saarbrucken (DE); Valentina Galata, Saarbrucken (DE)

(21) Appl. No.: 15/747,295

(22) PCT Filed: Jul. 25, 2016
(86) PCT No.: PCT/EP2016/067611

§ 371 Date: Jan. 24, 2018

(30) Foreign Application Priority Data
Jul. 29, 2015 (EP) PCT/EP2015/067413

(51) Int. Cl. C12Q 1/689

(52) U.S. Cl. CPC C12Q 1/689; C12Q 2600/156

(57) ABSTRACT

The invention relates to a method of determining an infection of a patient with Stenotrophomonas species potentially resistant to antimicrobial drug treatment, a method of selecting a treatment of a patient suffering from an antibiotic resistant Stenotrophomonas infection, and a method of determining an antibiotic resistance profile for bacterial microorganisms of Stenotrophomonas species, as well as computer program products used in these methods. In an exemplary method, a sample 1, is used for molecular testing 2, and then a molecular fingerprint 3 is taken. The result is then compared to a reference library 4, and the result 5 is reported.

[0001] The present invention relates to a method of determining an infection of a patient with Stenotrophomonas species potentially resistant to antimicrobial drug treatment, a method of selecting a treatment of a patient suffering from an infection with a potentially resistant Stenotrophomonas strain, and a method of determining an antimicrobial drug, e.g. antibiotic, resistance profile for bacterial microorganisms of Stenotrophomonas species, as well as computer program products used in these methods.

[0002] Antibiotic resistance is a form of drug resistance whereby a sub-population of a microorganism, e.g. a strain of a bacterial species, can survive and multiply despite exposure to an antibiotic drug. It is a serious and health concern for the individual patient as well as a major public health issue. Timely treatment of a bacterial infection requires the analysis of clinical isolates obtained from patients with regard to antibiotic resistance, in order to select an efficacious therapy. Generally, for this purpose an association of the identified resistance with a certain microorganism (i.e. ID) is necessary.

[0003] Antibacterial drug resistance (ADR) represents a major health burden. According to the World Health Organization's antimicrobial resistance global report on surveillance, ADR leads to 25,000 deaths per year in Europe and 23,000 deaths per year in the US. In Europe, 2.5 million extra hospital days lead to societal cost of 1.5 billion euro. In the US, the direct cost of 2 million illnesses leads to 20 billion dollar direct cost. The overall cost is estimated to be substantially higher, reducing the gross domestic product (GDP) by up to 1.6%.

[0004] Stenotrophomonas maltophilia is a Gram-negative obligate aerobe organism that is rod shaped and motile with a few polar flagella. The organism is an environmental bacterium found in aqueous habitats, including plant rhizospheres, animals, foods, and water sources.

[0005] Although not inherently virulent organisms, these environmental Gram negatives can complicate treatment in those who are immunocompromised, critically ill in the intensive care unit and those patients with suppurative lung disease, such as cystic fibrosis.

[0006] Infections associated with Stenotrophomonas maltophilia include (most commonly) respiratory tract infections (pneumonia and acute exacerbations of chronic obstructive pulmonary disease [COPD]); bacteremia; biliary sepsis; infections of the bones and joints, urinary tract, and soft tissues; endophthalmitis; eye infections; endocarditis and meningitis.

[0007] Stenotrophomonas maltophilia exhibits resistance to a broad array of antibiotics, including TMP-SMX, β-lactam antibiotics, macrolides, cephalosporins, fluoroquinolones, aminoglycosides, carbapenems, chloramphenicol, tetracyclines, and polymyxins and is an emerging multidrug-resistant global opportunistic pathogen.

[0008] In general the mechanisms for resistance of bacteria against antimicrobial treatments rely to a very substantial part on the organism's genetics. The respective genes or molecular mechanisms are either encoded in the genome of the bacteria or on plasmids that can be interchanged between different bacteria. The most common resistance mechanisms include:
[0009] 1) Efflux pumps are high-affinity reverse transport systems located in the membrane that transports the antibiotic out of the cell, e.g. resistance to tetracycline.
[0010] 2) Specific enzymes modify the antibiotic in a way that it loses its activity. In the case of streptomycin, the antibiotic is chemically modified so that it will no longer bind to the ribosome to block protein synthesis.
[0011] 3) An enzyme is produced that degrades the antibiotic, thereby inactivating it. For example, the penicillinases are a group of beta-lactamase enzymes that cleave the beta lactam ring of the penicillin molecule.

[0012] In addition, some pathogens show natural resistance against drugs. For example, an organism can lack a transport system for an antibiotic or the target of the antibiotic molecule is not present in the organism.

[0013] Pathogens that are in principle susceptible to drugs can become resistant by modification of existing genetic material (e.g. spontaneous mutations for antibiotic resistance, happening in a frequency of one in about 100 mio bacteria in an infection) or the acquisition of new genetic material from another source. One example is horizontal gene transfer, a process where genetic material contained in small packets of DNA can be transferred between individual bacteria of the same species or even between different species. Horizontal gene transfer may happen by transduction, transformation or conjugation.

[0014] Generally, testing for susceptibility/resistance to antimicrobial agents is performed by culturing organisms in different concentration of these agents.

[0015] In brief, agar plates are inoculated with patient sample (e.g. urine, sputum, blood, stool) overnight. On the next day individual colonies are used for identification of organisms, either by culturing or using mass spectroscopy. Based on the identity of organisms new plates containing increasing concentration of drugs used for the treatment of these organisms are inoculated and grown for additional 12-24 hours. The lowest drug concentration which inhibits growth (minimal inhibitory concentration—MIC) is used to determine susceptibility/resistance for tested drugs. The process takes at least 2 to 3 working days during which the patient is treated empirically. A significant reduction of time-to-result is needed especially in patients with life-threatening disease and to overcome the widespread misuse of antibiotics.

[0016] Recent developments include PCR based test kits for fast bacterial identification (e.g. Biomerieux Biofire Tests, Curetis Unyvero Tests). With these test the detection of selected resistance loci is possible for a very limited number of drugs, but no correlation to culture based AST is given. Mass spectroscopy is increasingly used for identification of pathogens in clinical samples (e.g. Bruker Biotyper), and research is ongoing to establish methods for the detection of susceptibility/resistance against antibiotics.

[0017] For some drugs such it is known that at least two targets are addressed, e.g. in case of Ciprofloxacin (drug bank ID 00537; http://www.drugbank.ca/drugs/DB00537) targets include DNA Topoisomerase IV, DNA Topoisomerase II and DNA Gyrase. It can be expected that this is also the case for other drugs although the respective secondary targets have not been identified yet. In case of a common regulation, both relevant genetic sites would naturally show a co-correlation or redundancy.

[0018] It is known that drug resistance can be associated with genetic polymorphisms. This holds for viruses, where resistance testing is established clinical practice (e.g. HIV genotyping). More recently, it has been shown that resistance has also genetic causes in bacteria and even higher organisms, such as humans where tumors resistance against certain cytostatic agents can be linked to genomic mutations.

[0019] Wozniak et al. (BMC Genomics 2012, 13(Suppl 7):S23) disclose genetic determinants of drug resistance in Staphylococcus aureus based on genotype and phenotype data. Stoesser et al. disclose prediction of antimicrobial susceptibilities for Escherichia coli and Klebsiella pneumoniae isolates using whole genomic sequence data (J Antimicrob Chemother 2013; 68: 2234-2244).

[0020] Chewapreecha et al (Chewapreecha et al (2014) Comprehensive Identification of single nucleotid polymorphisms associated with beta-lactam resistance within pneumococcal mosaic genes. PLoS Genet 10(8): e1004547) used a comparable approach to identify mutations in gram-positive Streptococcus Pneumonia.

[0021] The fast and accurate detection of infections with Stenotrophomonas species and the prediction of response to anti-microbial therapy represent a high unmet clinical need.

[0022] This need is addressed by the present invention.

### SUMMARY OF THE INVENTION

[0023] The present inventors addressed this need by carrying out whole genome sequencing of a large cohort of Stenotrophomonas clinical isolates and comparing the genetic mutation profile to classical culture based antimicrobial susceptibility testing with the goal to develop a test which can be used to detect bacterial susceptibility/resistance against antimicrobial drugs using molecular testing.

[0024] The inventors performed extensive studies on the genome of bacteria of Stenotrophomonas species either susceptible or resistant to antimicrobial, e.g. antibiotic, drugs. Based on this information, it is now possible to provide a detailed analysis on the resistance pattern of Stenotrophomonas strains based on individual genes or mutations on a nucleotide level. This analysis involves the identification of a resistance against individual antimicrobial, e.g. antibiotic, drugs as well as clusters of them. This allows not only for the determination of a resistance to a single antimicrobial, e.g. antibiotic, drug, but also to groups of antimicrobial drugs, e.g. antibiotics such as lactam or quinolone antibiotics, or even to all relevant antibiotic drugs.

[0025] Therefore, the present invention will considerably facilitate the selection of an appropriate antimicrobial, e.g. antibiotic, drug for the treatment of a Stenotrophomonas infection in a patient and thus will largely improve the quality of diagnosis and treatment.

[0026] According to a first aspect, the present invention discloses a diagnostic method of determining an infection of a patient with Stenotrophomonas species potentially resistant to antimicrobial drug treatment, which can be also described as a method of determining an antimicrobial drug, e.g. antibiotic, resistant Stenotrophomonas infection of a patient, comprising the steps of:

[0027] a) obtaining or providing a sample containing or suspected of containing at least one Stenotrophomonas species from the patient;

[0028] b) determining the presence of at least one mutation in at least two genes from the group of genes listed in Table 1 or Table 2 below, wherein the presence of said at least two mutations is indicative of an infection with an antimicrobial drug resistant, e.g. antibiotic resistant, Stenotrophomonas strain in said patient.

[0029] An infection of a patient with Stenotrophomonas species potentially resistant to antimicrobial drug treatment herein means an infection of a patient with Stenotrophomonas species wherein it is unclear if the Stenotrophomonas species is susceptible to treatment with a specific antimicrobial drug or if it is resistant to the antimicrobial drug.

[0030] In step b) above, as well as corresponding steps, at least one mutation in at least two genes is determined, so that in total at least two mutations are determined, wherein the two mutations are in different genes.

TABLE 1
List of genes

| | | | | |
|---|---|---|---|---|
| SMD_3200 | SMD_3579 | SMD_3610 | SMD_4135 | SMD_3493 |
| SMD_0995 | SMD_2708 | cbpD | SMD_2457 | SMD_2911 |
| gspL | SMD_2447 | SMD_0184 | SMD_1120 | SMD_4120 |
| SMD_0498 | recF | fliK | rtcB | SMD_0069 |
| SMD_1911 | SMD_1996 | glgX | SMD_4066 | SMD_3568 |
| ku | gcd | SMD_3572 | SMD_3603 | SMD_2199 |
| SMD_2221 | thiC | SMD_3992 | SMD_3982 | SMD_1353 |
| StmPr1 | SMD_3983 | SMD_2572 | tolA | SMD_1351 |
| cyoA2 | SMD_1123 | SMD_1926 | SMD_3570 | SMD_2620 |
| SMD_2277 | SMD_1205 | SMD_1639 | SMD_2575 | SMD_1320 |

TABLE 2
List of genes

| | | | | |
|---|---|---|---|---|
| SMD_3691 | SMD_0155 | glnD | SMD_0669 | SMD_2553 |
| SMD_3631 | aspC | SMD_0301 | SMD_2035 | SMD_1117 |
| SMD_1654 | SMD_3927 | nth | SMD_0861 | SMD_1105 |
| SMD_3707 | fpr | petB | SMD_0692 | SMD_3559 |
| ftsW | yceG | SMD_1902 | poxB | SMD_3500 |
| SMD_1737 | pepA | adi | hmgA | SMD_0173 |
| SMD_4199 | SMD_0947 | ppk | SMD_3929 | sspB |
| SMD_2800 | SMD_3928 | fadL | selD | otsA |
| SMD_2693 | xpsD | atpG | SMD_1163 | SMD_0676 |
| SMD_1030 | mgtE2 | engB | uvrA | dsbA2 |

[0031] According to a second aspect, the present invention relates to a method of selecting a treatment of a patient suffering from an infection with a potentially resistant Stenotrophomonas strain, e.g. from an antimicrobial drug, e.g. antibiotic, resistant Stenotrophomonas infection, comprising the steps of:

[0032] a) obtaining or providing a sample containing or suspected of containing at least one Stenotrophomonas species from the patient;

[0033] b) determining the presence of at least one mutation in at least two genes from the group of genes listed in Table 1 or Table 2 above, wherein the presence of said at least two mutations is indicative of a resistance to one or more antimicrobial, e.g. antibiotic, drugs;

[0034] c) identifying said at least one or more antimicrobial, e.g. antibiotic, drugs; and

[0035] d) selecting one or more antimicrobial, e.g. antibiotic, drugs different from the ones identified in step c) and being suitable for the treatment of a Stenotrophomonas infection.

[0036] A third aspect of the present invention relates to a method of determining an antimicrobial drug, e.g. antibiotic, resistance profile for bacterial microorganisms of Stenotrophomonas species, comprising:

[0037] obtaining or providing a first data set of gene sequences of a plurality of clinical isolates of Stenotrophomonas species;

[0038] providing a second data set of antimicrobial drug, e.g. antibiotic, resistance of the plurality of clinical isolates of Stenotrophomonas species;

[0039] aligning the gene sequences of the first data set to at least one, preferably one, reference genome of Stenotrophomonas, and/or assembling the gene sequence of the first data set, at least in part;

[0040] analyzing the gene sequences of the first data set for genetic variants to obtain a third data set of genetic variants;

[0041] correlating the third data set with the second data set and statistically analyzing the correlation; and

[0042] determining the genetic sites in the genome of Stenotrophomonas associated with antimicrobial drug, e.g. antibiotic, resistance.

[0043] In addition, the present invention relates in a fourth aspect to a method of determining an antimicrobial drug, e.g. antibiotic, resistance profile for a bacterial microorganism belonging to the species Stenotrophomonas comprising the steps of

[0044] a) obtaining or providing a sample containing or suspected of containing the bacterial microorganism;

[0045] b) determining the presence of a mutation in at least one gene of the bacterial microorganism as determined by the method according to the third aspect of the present invention;

[0046] wherein the presence of a mutation is indicative of a resistance to an antimicrobial, e.g. antibiotic, drug.

[0047] Furthermore, the present invention discloses in a fifth aspect a diagnostic method of determining an infection of a patient with Stenotrophomonas species potentially resistant to antimicrobial drug treatment, which can, like in the first aspect, also be described as method of determining an antimicrobial drug, e.g. antibiotic, resistant Stenotrophomonas infection of a patient, comprising the steps of:

[0048] a) obtaining or providing a sample containing or suspected of containing a bacterial microorganism belonging to the species Stenotrophomonas from the patient;

[0049] b) determining the presence of at least one mutation in at least one gene of the bacterial microorganism belonging to the species Stenotrophomonas as determined by the method according to the third aspect of the present invention, wherein the presence of said at least one mutation is indicative of an antimicrobial drug, e.g. antibiotic, resistant Stenotrophomonas infection in said patient.

[0050] Also disclosed is in a sixth aspect a method of selecting a treatment of a patient suffering from an infection with a potentially resistant Stenotrophomonas strain, e.g. from an antimicrobial drug, e.g. antibiotic, resistant Stenotrophomonas infection, comprising the steps of:

[0051] a) obtaining or providing a sample containing or suspected of containing a bacterial microorganism belonging to the species Stenotrophomonas from the patient;

[0052] b) determining the presence of at least one mutation in at least one gene of the bacterial microorganism belonging to the species Stenotrophomonas as determined by the method according to the third aspect of the present invention, wherein the presence of said at least one mutation is indicative of a resistance to one or more antimicrobial, e.g. antibiotic, drugs;

[0053] c) identifying said at least one or more antimicrobial, e.g. antibiotic, drugs; and

[0054] d) selecting one or more antimicrobial, e.g. antibiotic, drugs different from the ones identified in step c) and being suitable for the treatment of a Stenotrophomonas infection.

[0055] A seventh aspect of the present invention relates to a method of acquiring, respectively determining, an antimicrobial drug, e.g. antibiotic, resistance profile for a bacterial microorganism of Stenotrophomonas species, comprising:

[0056] obtaining or providing a first data set of gene sequences of a clinical isolate of Stenotrophomonas species;

[0057] providing a second data set of antimicrobial drug, e.g. antibiotic, resistance of a plurality of clinical isolates of Stenotrophomonas species;

[0058] aligning the gene sequences of the first data set to at least one, preferably one, reference genome of Stenotrophomonas, and/or assembling the gene sequence of the first data set, at least in part;

[0059] analyzing the gene sequences of the first data set for genetic variants to obtain a third data set of genetic variants of the first data set;

[0060] correlating the third data set with the second data set and statistically analyzing the correlation; and

[0061] determining the genetic sites in the genome of Stenotrophomonas of the first data set associated with antimicrobial drug, e.g. antibiotic, resistance.

[0062] According to an eighth aspect, the present invention discloses a computer program product comprising executable instructions which, when executed, perform a method according to the third, fourth, fifth, sixth or seventh aspect of the present invention.

[0063] Further aspects and embodiments of the invention are disclosed in the dependent claims and can be taken from the following description, figures and examples, without being limited thereto.

### FIGURES

[0064] The enclosed drawings should illustrate embodiments of the present invention and convey a further understanding thereof. In connection with the description they serve as explanation of concepts and principles of the invention. Other embodiments and many of the stated advantages can be derived in relation to the drawings. The elements of the drawings are not necessarily to scale towards each other. Identical, functionally equivalent and acting equal features and components are denoted in the figures of the drawings with the same reference numbers, unless noted otherwise.

[0065] FIG. 1 shows schematically a read-out concept for a diagnostic test according to a method of the present invention.

### DETAILED DESCRIPTION OF THE PRESENT INVENTION

[0066] Definitions

[0067] Unless defined otherwise, technical and scientific terms used herein have the same meaning as commonly understood by one of ordinary skill in the art to which this invention belongs.

[0068] An “antimicrobial drug” in the present invention refers to a group of drugs that includes antibiotics, antifungals, antiprotozoals, and antivirals. According to certain embodiments, the antimicrobial drug is an antibiotic.

[0069] The term “nucleic acid molecule” refers to a polynucleotide molecule having a defined sequence. It comprises DNA molecules, RNA molecules, nucleotide analog molecules and combinations and derivatives thereof, such as DNA molecules or RNA molecules with incorporated nucleotide analogs or cDNA.

[0070] The term “nucleic acid sequence information” relates to information which can be derived from the sequence of a nucleic acid molecule, such as the sequence itself or a variation in the sequence as compared to a reference sequence.

[0071] The term “mutation” relates to a variation in the sequence as compared to a reference sequence. Such a reference sequence can be a sequence determined in a predominant wild type organism or a reference organism, e.g. a defined and known bacterial strain or substrain. A mutation is for example a deletion of one or multiple nucleotides, an insertion of one or multiple nucleotides, or substitution of one or multiple nucleotides, duplication of one or a sequence of multiple nucleotides, translocation of one or a sequence of multiple nucleotides, and, in particular, a single nucleotide polymorphism (SNP).

[0072] In the context of the present invention a “sample” is a sample which comprises at least one nucleic acid molecule from a bacterial microorganism. Examples for samples are: cells, tissue, body fluids, biopsy specimens, blood, urine, saliva, sputum, plasma, serum, cell culture supernatant, swab sample and others. According to certain embodiments, the sample is a patient sample (clinical isolate).

[0073] New and highly efficient methods of sequencing nucleic acids referred to as next generation sequencing have opened the possibility of large scale genomic analysis. The term “next generation sequencing” or “high throughput sequencing” refers to high-throughput sequencing technologies that parallelize the sequencing process, producing thousands or millions of sequences at once. Examples include Massively Parallel Signature Sequencing (MPSS), Polony sequencing, 454 pyrosequencing, Illumina (Solexa) sequencing, SOLiD sequencing, Ion semiconductor sequencing, DNA nanoball sequencing, Helioscope™ single molecule sequencing, Single Molecule SMRT™ sequencing, Single Molecule real time (RNAP) sequencing, Nanopore DNA sequencing, Sequencing By Hybridization, Amplicon Sequencing, GnuBio.

[0074] Within the present description the term “microorganism” comprises the term microbe. The type of microorganism is not particularly restricted, unless noted otherwise or obvious, and, for example, comprises bacteria, viruses, fungi, microscopic algae and protozoa, as well as combinations thereof. According to certain aspects, it refers to one or more Stenotrophomonas species, particularly Stenotrophomonas maltophilia.

[0075] A reference to a microorganism or microorganisms in the present description comprises a reference to one microorganism as well a plurality of microorganisms, e.g. two, three, four, five, six or more microorganisms.

[0076] A vertebrate within the present invention refers to animals having a vertebrae, which includes mammals—including humans, birds, reptiles, amphibians and fishes. The present invention thus is not only suitable for human medicine, but also for veterinary medicine.

[0077] According to certain embodiments, the patient in the present methods is a vertebrate, more preferably a mammal and most preferred a human patient.

[0078] Before the invention is described in exemplary detail, it is to be understood that this invention is not limited to the particular component parts of the process steps of the methods described herein as such methods may vary. It is also to be understood that the terminology used herein is for purposes of describing particular embodiments only, and is not intended to be limiting. It must be noted that, as used in the specification and the appended claims, the singular forms “a,” “an” and “the” include singular and/or plural referents unless the context clearly dictates otherwise. For example, the term “a” as used herein can be understood as one single entity or in the meaning of “one or more” entities. It is also to be understood that plural forms include singular and/or plural referents unless the context clearly dictates otherwise. It is moreover to be understood that, in case parameter ranges are given which are delimited by numeric values, the ranges are deemed to include these limitation values.

[0079] Regarding the dosage of the antimicrobial, e.g. antibiotic, drugs, it is referred to the established principles of pharmacology in human and veterinary medicine. For example, Forth, Henschler, Rummel “Allgemeine und spezielle Pharmakologie und Toxikologie”, 9th edition, 2005, pp. 781-919, might be used as a guideline. Regarding the formulation of a ready-to-use medicament, reference is made to “Remington, The Science and Practice of Pharmacy”, 22^{nd} edition, 2013, pp. 777-1070.

[0080] Assembling of a gene sequence can be carried out by any known method and is not particularly limited.

[0081] According to certain embodiments, mutations that were found using alignments can also be compared or matched with alignment-free methods, e.g. for detecting single base exchanges, for example based on contigs that were found by assemblies. For example, reads obtained from sequencing can be assembled to contigs and the contigs can be compared to each other.

[0082] According to a first aspect, the present invention relates to a diagnostic method of determining an infection of a patient with Stenotrophomonas species potentially resistant to antimicrobial drug treatment, which can also be described as method of determining an antimicrobial drug, e.g. antibiotic, resistant Stenotrophomonas infection of a patient, comprising the steps of:

[0083] a) obtaining or providing a sample containing or suspected of containing at least one Stenotrophomonas species from the patient;

[0084] b) determining the presence of at least one mutation in at least two genes from the group of genes consisting of SMD_3200, SMD_3579, SMD_3610, SMD_4135, SMD_3493, SMD_0995, SMD_2708, cbpD, SMD_2457, SMD_2911, gspL, SMD_2447, SMD_0184, SMD_1120, SMD_4120, SMD_0498, recF, fliK, rtcB, SMD_0069, SMD_1911, SMD_1996, glgX, SMD_4066, SMD_3568, ku, gcd, SMD_3572, SMD_3603, SMD_2199, SMD_2221, thiC, SMD_3992, SMD_3982, SMD_1353, StmPrl, SMD_3983, SMD_2572, tolA, SMD_1351, cyoA2, SMD_1123, SMD_1926, SMD_3570, SMD_2620, SMD_2277, SMD_1205, SMD_1639, SMD_2575, and SMD_1320, or from the group of genes consisting of SMD_3691, SMD_0155, glnD, SMD_0669, SMD_2553, SMD_3631, aspC, SMD_0301, SMD_2035, SMD_1117, SMD_1654, SMD_3927, nth, SMD_0861, SMD_1105, SMD_3707, fpr, petB, SMD_0692, SMD_3559, ftsW, yceG, SMD_1902, poxB, SMD_3500, SMD_1737, pepA, adi, hmgA, SMD_0173, SMD_4199, SMD_0947, ppk, SMD_3929, sspB, SMD_2800, SMD_3928, fadL, selD, otsA, SMD_2693, xpsD, atpG, SMD_1163, SMD_0676, SMD_1030, mgtE2, engB, uvrA, and dsbA2, wherein the presence of said at least two mutations is indicative of an infection with an antimicrobial, e.g. antibiotic, resistant Stenotrophomonas strain in said patient.

[0085] In this method, as well as the other methods of the invention, the sample can be provided or obtained in any way, preferably non-invasive, and can be e.g. provided as an in vitro sample or prepared as in vitro sample.

[0086] According to certain aspects, mutations in at least two, three, four, five, six, seven, eight, nine or ten genes are determined in any of the methods of the present invention, e.g. in at least two genes or in at least three genes. Instead of testing only single genes or mutants, a combination of several variant positions can improve the prediction accuracy and further reduce false positive findings that are influenced by other factors. Therefore, it is in particular preferred to determine the presence of a mutation in 2, 3, 4, 5, 6, 7, 8 or 9 (or more) genes selected from Table 1 or 2.

[0087] For the above genes, i.e. the genes also denoted in Tables 1 and 2, the highest probability of a resistance to at least one antimicrobial drug, e.g. antibiotic, could be observed, with p-values smaller than 10⁻¹⁰, particularly smaller than 10⁻²⁰, particularly smaller than 10⁻³⁰, indicating the high significance of the values (n=519; α=0.05). Details regarding Tables 1 and 2 can be taken from Tables 3 and 4 (4a, 4b, 4c) disclosed in the Examples. Having at least two genes with mutations determined, a high probability of an antimicrobial drug, e.g. antibiotic, resistance could be determined. The genes in Table 1 thereby represent the 50 best genes for which a mutation was observed in the genomes of Stenotrophomonas species, whereas the genes in Table 2 represent the 50 best genes for which a cross-correlation could be observed for the antimicrobial drug, e.g. antibiotic, susceptibility testing for Stenotrophomonas species as described below.

[0088] According to certain embodiments, the obtaining or providing a sample containing or suspected of containing at least one Stenotrophomonas species from the patient in this method—as well as the other methods of the invention—can comprise the following:

[0089] A sample of a vertebrate, e.g. a human, e.g. is provided or obtained and nucleic acid sequences, e.g. DNA or RNA sequences, are recorded by a known method for recording nucleic acid, which is not particularly limited. For example, nucleic acid can be recorded by a sequencing method, wherein any sequencing method is appropriate, particularly sequencing methods wherein a multitude of sample components, as e.g. in a blood sample, can be analyzed for nucleic acids and/or nucleic acid fragments and/or parts thereof contained therein in a short period of time, including the nucleic acids and/or nucleic acid fragments and/or parts thereof of at least one microorganism of interest, particularly of at least one Stenotrophomonas species. For example, sequencing can be carried out using polymerase chain reaction (PCR), particularly multiplex PCR, or high throughput sequencing or next generation sequencing, preferably using high-throughput sequencing. For sequencing, preferably an in vitro sample is used.

[0090] The data obtained by the sequencing can be in any format, and can then be used to identify the nucleic acids, and thus genes, of the microorganism, e.g. of Stenotrophomonas species, to be identified, by known methods, e.g. fingerprinting methods, comparing genomes and/or aligning to at least one, or more, genomes of one or more species of the microorganism of interest, i.e. a reference genome, etc., forming a third data set of aligned genes for a Stenotrophomonas species—discarding additional data from other sources, e.g. the vertebrate. Reference genomes are not particularly limited and can be taken from several databases. Depending on the microorganism, different reference genomes or more than one reference genomes can be used for aligning. Using the reference genome—as well as also the data from the genomes of the other species, e.g. Stenotrophomonas species—mutations in the genes for each species and for the whole multitude of samples of different species, e.g. Stenotrophomonas species, can be obtained.

[0091] For example, it is useful in genome-wide association studies to reference the points of interest, e.g. mutations, to one constant reference for enhanced standardization. In case of the human with a high consistency of the genome and 99% identical sequences among individuals this is easy and represents the standard, as corresponding reference genomes are available in databases. In case of organisms that trigger infectious diseases (e.g. bacteria and viruses) this is much more difficult, though. One possibility is to fall back on a virtual pan genome which contains all sequences of a certain genus. A further possibility is the analysis of all available references, which is much more complex. Therein all n references from a database (e.g. RefSeq) are extracted and compared with the newly sequenced bacterial genomes k. After this, matrices (% of mapped reads, % of covered genome) are applied to estimate which reference is best suited to all new bacteria. However, n×k complete alignments are carried out. Having a big number of references, though, stable results can be obtained, as is the case for Stenotrophomonas.

[0092] According to certain embodiments, the genomes of Stenotrophomonas species are referenced to one reference genome. However, it is not excluded that for other microorganisms more than one reference genome is used. In the present methods, the reference genome of Stenotrophomonas is NC_017671 as annotated at the NCBI according to certain embodiments. The reference genome is attached to this application as sequence listing with SEQ ID NO 1.

[0093] The reference sequence was obtained from Stenotrophomonas strain NC_0176712 (http://www.genome.jp/dbget-bin/www_bget?refseq+NC_017671)

[0094] LOCUS NC_017671 4769156 bp DNA circular CON 07-FEB-2015

[0095] DEFINITION Stenotrophomonas maltophilia D457 complete genome.

[0096] ACCESSION NC_017671

[0097] VERSION NC_017671.1 GI:386716467

[0098] DBLINK BioProject: PRJNA224116
[0099] Assembly: GCF_000284595.1

[0100] KEYWORDS RefSeq; complete genome.

[0101] SOURCE Stenotrophomonas maltophilia D457
[0102] ORGANISM Stenotrophomonas maltophilia D457
   [0103] Bacteria; Proteobacteria; Gammaproteobacteria;

[0104] Xanthomonadales; Xanthomonadaceae; Stenotrophomonas; Stenotrophomonas maltophilia group.

[0105] REFERENCE 1
[0106] AUTHORS Lira, F., Hernandez, A., Belda, E., Sanchez, M. B., Moya, A., Silva, F. J. and Martinez, J. L.
[0107] TITLE Whole-genome sequence of Stenotrophomonas maltophilia D457, a clinical isolate and a model strain
[0108] JOURNAL J. Bacteriol. 194 (13), 3563-3564 (2012)
   [0109] PUBMED 22689246

[0110] REFERENCE 2 (bases 1 to 4769156)
[0111] AUTHORS Silva, F.
[0112] TITLE Direct Submission
[0113] JOURNAL Submitted (28-MAR-2012) Institut Cavanilles de Biodiversitat i
   [0114] Biol. Evol., University of Valencia, Apartat 22085, Valencia 46071, SPAIN

[0115] Alternatively or in addition, the gene sequence of the first data set can be assembled, at least in part, with known methods, e.g. by de-novo assembly or mapping assembly. The sequence assembly is not particularly limited, and any known genome assembler can be used, e.g. based on Sanger, 454, Solexa, Illumina, SOLid technologies, etc., as well as hybrids/mixtures thereof.

[0116] According to certain embodiments, the data of nucleic acids of different origin than the microorganism of interest, e.g. Stenotrophomonas species, can be removed after the nucleic acids of interest are identified, e.g. by filtering the data out. Such data can e.g. include nucleic acids of the patient, e.g. the vertebrate, e.g. human, and/or other microorganisms, etc. This can be done by e.g. computational subtraction, as developed by Meyerson et al. 2002. For this, also aligning to the genome of the vertebrate, etc., is possible. For aligning, several alignment-tools are available. This way the original data amount from the sample can be drastically reduced.

[0117] Also after such removal of “excess” data, fingerprinting and/or aligning, and/or assembly, etc. can be carried out, as described above, forming a third data set of aligned and/or assembled genes for a Stenotrophomonas species.

[0118] Using these techniques, genes with mutations of the microorganism of interest, e.g. Stenotrophomonas species, can be obtained for various species.

[0119] When testing these same species for antimicrobial drug, e.g. antibiotic, susceptibility of a number of antimicrobial drugs, e.g. antibiotics, e.g. using standard culturing methods on dishes with antimicrobial drug, e.g. antibiotic, intake, as e.g. described below, the results of these antimicrobial drug, e.g. antibiotic, susceptibility tests can then be cross-referenced/correlated with the mutations in the genome of the respective microorganism, e.g. Stenotrophomonas. Using several, e.g. 50 or more than 50, 100 or more than 100, 200 or more than 200, 300 or more than 300, 400 or more than 400, or 500 or more than 500 different species of a microorganism, e.g. different Stenotrophomonas species, statistical analysis can be carried out on the obtained cross-referenced data between mutations and antimicrobial drug, e.g. antibiotic, susceptibility for these number of species, using known methods.

[0120] Regarding culturing methods, samples can be e.g. cultured overnight. On the next day individual colonies can be used for identification of organisms, either by culturing or using mass spectroscopy. Based on the identity of organisms new plates containing increasing concentration of antibiotics used for the treatment of these organisms are inoculated and grown for additional 12-24 hours. The lowest drug concentration which inhibits growth (minimal inhibitory concentration—MIC) can be used to determine susceptibility/resistance for tested antibiotics.

[0121] Correlation of the nucleic acid/gene mutations with antimicrobial drug, e.g. antibiotic, resistance can be carried out in a usual way and is not particularly limited. For example, resistances can be correlated to certain genes or certain mutations, e.g. SNPs, in genes. After correlation, statistical analysis can be carried out.

[0122] In addition, statistical analysis of the correlation of the gene mutations with antimicrobial drug, e.g. antibiotic, resistance is not particularly limited and can be carried out, depending on e.g. the amount of data, in different ways, for example using analysis of variance (ANOVA) or Student's t-test, for example with a sample size n of 50 or more, 100 or more, 200 or more, 300 or more, 400 or more or 500 or more, and a level of significance (α-error-level) of e.g. 0.05 or smaller, e.g. 0.05, preferably 0.01 or smaller. A statistical value can be obtained for each gene and/or each position in the genome as well as for all antibiotics tested, a group of antibiotics or a single antibiotic. The obtained p-values can also be adapted for statistical errors, if needed.

[0123] For statistically sound results a multitude of individuals should be sampled, with n=50, 100, 200, 300, 400 or 500, and a level of significance (α-error-level) of e.g. 0.05 or smaller, e.g. 0.05, preferably 0.01 or smaller. According to certain embodiments, particularly significant results can be obtained for n=200, 300, 400 or 500.

[0124] For statistically sound results a multitude of individuals should be sampled, with n=50 or more, 100 or more, 200 or more, 300 or more, 400 or more or 500 or more, and a level of significance (α-error-level) of e.g. 0.05 or smaller, e.g. 0.05, preferably 0.01 or smaller. According to certain embodiments, particularly significant results can be obtained for n=200 or more, 300 or more, 400 or more or 500 or more.

[0125] After the above procedure has been carried out for more than 500, e.g. 519, individual species of Stenotrophomonas, the data disclosed in Tables 1 and 2 were obtained for the statistically best correlations between gene mutations and antimicrobial drug, e.g. antibiotic, resistances. Thus, mutations in these genes were proven as valid markers for antimicrobial drug, e.g. antibiotic, resistance.

[0126] According to a further aspect, the present invention relates in a second aspect to a method of selecting a treatment of a patient suffering from an infection with a potentially resistant Stenotrophomonas strain, e.g. from an antimicrobial drug, e.g. antibiotic, resistant Stenotrophomonas infection, comprising the steps of:

[0127] a) obtaining or providing a sample containing or suspected of containing at least one Stenotrophomonas species from the patient;

[0128] b) determining the presence of at least one mutation in at least two genes from the group of genes consisting of SMD_3200, SMD_3579, SMD_3610, SMD_4135, SMD_3493, SMD_0995, SMD_2708, cbpD, SMD_2457, SMD_2911, gspL, SMD_2447, SMD_0184, SMD_1120, SMD_4120, SMD_0498, recF, fliK, rtcB, SMD_0069, SMD_1911, SMD_1996, glgX, SMD_4066, SMD_3568, ku, gcd, SMD_3572, SMD_3603, SMD_2199, SMD_2221, thiC, SMD_3992, SMD_3982, SMD_1353, StmPrl, SMD_3983, SMD_2572, tolA, SMD_1351, cyoA2, SMD_1123, SMD_1926, SMD_3570, SMD_2620, SMD_2277, SMD_1205, SMD_1639, SMD_2575, and SMD_1320, or from the group of genes consisting of SMD_3691, SMD_0155, glnD, SMD_0669, SMD_2553, SMD_3631, aspC, SMD_0301, SMD_2035, SMD_1117, SMD_1654, SMD_3927, nth, SMD_0861, SMD_1105, SMD_3707, fpr, petB, SMD_0692, SMD_3559, ftsW, yceG, SMD_1902, poxB, SMD_3500, SMD_1737, pepA, adi, hmgA, SMD_0173, SMD_4199, SMD_0947, ppk, SMD_3929, sspB, SMD_2800, SMD_3928, fadL, selD, otsA, SMD_2693, xpsD, atpG, SMD_1163, SMD_0676, SMD_1030, mgtE2, engB, uvrA, and dsbA2, wherein the presence of said at least two mutations is indicative of a resistance to one or more antimicrobial, e.g. antibiotic, drugs;

[0129] c) identifying said at least one or more antimicrobial, e.g. antibiotic, drugs; and

[0130] d) selecting one or more antimicrobial, e.g. antibiotic, drugs different from the ones identified in step c) and being suitable for the treatment of a Stenotrophomonas infection.

[0131] In this method, the steps a) of obtaining or providing a sample and b) of determining the presence of at least one mutation are as in the method of the first aspect.

[0132] The identification of the at least one or more antimicrobial, e.g. antibiotic, drug in step c) is then based on the results obtained in step b) and corresponds to the antimicrobial, e.g. antibiotic, drug(s) that correlate(s) with the mutations. Once these antimicrobial drugs, e.g. antibiotics, are ruled out, the remaining antimicrobial drugs, e.g. antibiotic drugs/antibiotics, can be selected in step d) as being suitable for treatment.

[0133] In the description, references to the first and second aspect also apply to the 14^{th}, 15^{th}, 16^{th} and 17^{th} aspect, referring to the same genes, unless clear from the context that they don't apply.

[0134] According to certain embodiments in the method of the first or second aspect, at least a mutation in SMD_3691, particularly in position 4131408, and/or SMD_0155, particularly in position 194882, with regard to reference genome NC_017671 as annotated at the NCBI, is determined. For such mutations, a particularly relevant correlation with antimicrobial drug, e.g. antibiotic, resistance could be determined. In particular, the mutation in position 4131408 with regard to reference genome NC_017671 as annotated at the NCBI is a frame shift mutation or results in a non-synonymous substitution, particularly a codon change −/C;Agc/Cgc;Agc/Tgc, and the mutation in position 194882 with regard to reference genome NC_017671 as annotated at the NCBI is a frame shift mutation or a non-synonymous substitution, particularly a codon change −/−;gCt/gTt.

[0135] According to certain embodiments, the antimicrobial drug, e.g. antibiotic, in the method of the first or second aspect, as well as in the other methods of the invention, is at least one selected from the group of β-lactams, β-lactam inhibitors, quinolines and derivatives thereof, aminoglycosides, polyketides, respectively tetracyclines, and folate synthesis inhibitors.

[0136] In the methods of the invention the resistance of Stenotrophomonas to one or more antimicrobial, e.g. antibiotic, drugs can be determined according to certain embodiments.

[0137] According to certain embodiments of the first and/or second aspect of the invention the antimicrobial, e.g. antibiotic, drug is selected from lactam antibiotics and the presence of a mutation in the following genes is determined: SMD_3200, SMD_3579, SMD_3610, SMD_4135, SMD_3493, SMD_0995, SMD_2708, cbpD, SMD_2457, SMD_2911, gspL, SMD_2447, SMD_0184, SMD_1120, SMD_4120, SMD_0498, recF, fliK, rtcB, SMD_0069, SMD_1911, SMD_1996, glgX, SMD_4066, SMD_3568, ku, gcd, SMD_3572, SMD_3603, SMD_2199, SMD_2221, thiC, SMD_3992, SMD_3982, SMD_1353, StmPrl, SMD_3983, SMD_2572, tolA, SMD_1351, cyoA2, SMD_1123, SMD_1926, SMD_3570, SMD_2620, SMD_2277, SMD_1205, SMD_1639, SMD_2575, and/or SMD_1320, or SMD_3691, SMD_0155, glnD, SMD_0669, SMD_2553, SMD_3631, SMD_0301, SMD_2035, SMD_1117, SMD_1654, nth, SMD_0861, SMD_1105, and/or fadL.

[0138] According to certain embodiments of the first and/or second aspect of the invention the antimicrobial, e.g. antibiotic, drug is selected from polyketide antibiotics, preferably tetracycline antibiotics, and the presence of a mutation in the following genes is determined: glnD, aspC, SMD_3927, SMD_3707, fpr, petB, SMD_0692, SMD_3559, ftsW, yceG, SMD_1902, poxB, SMD_3500, SMD_1737, pepA, adi, hmgA, SMD_0173, SMD_4199, ppk, SMD_3929, sspB, SMD_2800, SMD_3928, fadL, selD, otsA, SMD_2693, xpsD, atpG, SMD_1163, SMD_0676, SMD_1030, mgtE2, engB, uvrA, and/or dsbA2.

[0139] According to certain embodiments of the first and/or second aspect of the invention the antimicrobial, e.g. antibiotic, drug is selected from quinolone antibiotics, preferably fluoroquinolone antibiotics, and the presence of a mutation in the following genes is determined: SMD_0947.

[0140] According to certain embodiments, the antimicrobial drug is an antibiotic/antibiotic drug.

[0141] According to certain embodiments of the first and/or second aspect of the invention, determining the nucleic acid sequence information or the presence of a mutation comprises determining the presence of a single nucleotide at a single position in a gene. Thus the invention comprises methods wherein the presence of a single nucleotide polymorphism or mutation at a single nucleotide position is detected.

[0142] According to certain embodiments, the antibiotic drug in the methods of the present invention is selected from the group consisting of Amoxicillin/K Clavulanate (AUG), Ampicillin (AM), Aztreonam (AZT), Cefazolin (CFZ), Cefepime (CPE), Cefotaxime (CFT), Ceftazidime (CAZ), Ceftriaxone (CAX), Cefuroxime (CRM), Cephalotin (CF), Ciprofloxacin (CP), Ertapenem (ETP), Gentamicin (GM), Imipenem (IMP), Levofloxacin (LVX), Meropenem (MER), Piperacillin/Tazobactam (P/T), Ampicillin/Sulbactam (A/S), Tetracycline (TE), Tobramycin (TO), and Trimethoprim/Sulfamethoxazole (T/S).

[0143] The inventors have surprisingly found that mutations in certain genes are indicative not only for a resistance to one single antimicrobial, e.g. antibiotic, drug, but to groups containing several drugs.

[0144] According to certain embodiments of the first and/or second aspect of the invention, the gene is from Table 1, the antibiotic drug is selected from lactam antibiotics and a mutation in at least one of the following genes is detected with regard to reference genome NC_017671: SMD_3200, SMD_3579, SMD_3610, SMD_4135, SMD_3493, SMD_0995, SMD_2708, cbpD, SMD_2457, SMD_2911, gspL, SMD_2447, SMD_0184, SMD_1120, SMD_4120, SMD_0498, recF, fliK, rtcB, SMD_0069, SMD_1911, SMD_1996, glgX, SMD_4066, SMD_3568, ku, gcd, SMD_3572, SMD_3603, SMD_2199, SMD_2221, thiC, SMD_3992, SMD_3982, SMD_1353, StmPrl, SMD_3983, SMD_2572, tolA, SMD_1351, cyoA2, SMD_1123, SMD_1926, SMD_3570, SMD_2620, SMD_2277, SMD_1205, SMD_1639, SMD_2575, SMD_1320.

[0145] According to certain embodiments of the first and/or second aspect of the invention, the gene is from Table 2, the antibiotic drug is selected from lactam antibiotics and a mutation in at least one of the following genes is detected with regard to reference genome NC_017671: SMD_3691, SMD_0155, glnD, SMD_0669, SMD_2553, SMD_3631, SMD_0301, SMD_2035, SMD_1117, SMD_1654, nth, SMD_0861, SMD_1105, fadL.

[0146] According to certain embodiments of the first and/or second aspect of the invention, the gene is from Table 2, the antibiotic drug is selected from polyketide, preferably tetracycline antibiotics and a mutation in at least one of the following genes is detected with regard to reference genome NC_017671: glnD, aspC, SMD_3927, SMD_3707, fpr, petB, SMD_0692, SMD_3559, ftsW, yceG, SMD_1902, poxB, SMD_3500, SMD_1737, pepA, adi, hmgA, SMD_0173, SMD_4199, ppk, SMD_3929, sspB, SMD_2800, SMD_3928, fadL, selD, otsA, SMD_2693, xpsD, atpG, SMD_1163, SMD_0676, SMD_1030, mgtE2, engB, uvrA, dsbA2.

[0147] According to certain embodiments of the first and/or second aspect of the invention, the gene is from Table 2, the antibiotic drug is selected from quinolone, preferably fluoroquinolone antibiotics and a mutation in at least one of the following genes is detected with regard to reference genome NC_017671: SMD_0947.

[0148] For specific antimicrobial drugs, e.g. antibiotics, specific positions in the above genes can be determined where a high statistical significance is observed. The inventors found that, apart from the above genes indicative of a resistance against antibiotics, also single nucleotide polymorphisms (=SNP's) may have a high significance for the presence of a resistance against defined antibiotic drugs. The analysis of these polymorphisms on a nucleotide level may further improve and accelerate the determination of a drug resistance to antimicrobial drugs, e.g. antibiotics, in Stenotrophomonas.

[0149] According to certain embodiments of the first and/or second aspect of the invention, the gene is from Table 1, the antibiotic drug is selected from lactam antibiotics and a mutation in at least one of the following nucleotide positions is detected with regard to reference genome NC_017671: 3557927, 4007302, 4041091, 4641615, 3901645, 1114873, 3012515, 4561815, 2737238, 2737915, 3237877, 2685196, 2727935, 230900, 1246108, 4624913, 565544, 3743, 2290079, 4624707, 2737932, 4578962, 88895, 2736730, 3901643, 2113221, 2207398, 2692687, 4567013, 3997485, 3997701, 26655, 3020959, 4002023, 4032795, 88791, 2455892, 2470228, 2736735, 2736748, 3923235, 4471203, 3997839, 4001908, 2736904, 4458076, 1514781, 88957, 846345, 3997896, 4458551, 2693885, 2871674, 2737121, 203554, 1512298, 2684693, 4455112, 4624706, 1249159, 2128948, 4000529, 4458520, 2915609, 2540079, 1334488, 4459119, 3997781, 2694515, 1813212, 2128949, 2684936, 2873563, 1475785.

[0150] According to certain embodiments of the first and/or second aspect of the invention, the gene is from Table 2, the antibiotic drug is selected from lactam antibiotics and a mutation in at least one of the following nucleotide positions is detected with regard to reference genome NC_017671: 4131408, 194882, 1506862, 775975, 2849025, 4065975, 355423, 2263396, 1242591, 1827864, 1556268, 976566, 1227228, 413850.

[0151] According to certain embodiments of the first and/or second aspect of the invention, the gene is from Table 2, the antibiotic drug is selected from polyketide, preferably tetracycline antibiotics and a mutation in at least one of the following nucleotide positions is detected with regard to reference genome NC_017671: 1506862, 22076, 4395988, 4146408, 3120515, 1605192, 800868, 3986074, 740620, 1103580, 2105625, 3721056, 3907377, 1911810, 646078, 2875710, 4392432, 217129, 4722389, 966118, 4398229, 1607396, 3115508, 4397270, 413850, 3860405, 3728481, 2995516, 678940, 4141030, 1292846, 782557, 1150463, 4589465, 4019103, 1315236, 4021595.

[0152] According to certain embodiments of the first and/or second aspect of the invention, the gene is from Table 2, the antibiotic drug is selected from quinolone, preferably fluoroquinolone antibiotics and a mutation in at least one of the following nucleotide positions is detected with regard to reference genome NC_017671:1058512.

[0153] According to certain embodiments of the first and/or second aspect of the invention, the antibiotic drug is CAZ and a mutation in at least one of the following nucleotide positions is detected with regard to reference genome NC_017671: 4131408, 194882, 1506862, 775975, 2849025, 4065975, 355423, 2263396, 1242591, 1827864, 1556268, 976566, 1227228, 413850.

[0154] According to certain embodiments of the first and/or second aspect of the invention, the antibiotic drug is at least one of AZT and CAX and a mutation in at least one of the following nucleotide positions is detected with regard to reference genome NC_017671: 4131408, 194882, 775975, 2849025, 4065975, 355423, 2263396, 1242591, 1827864, 1556268, 976566, 1227228.

[0155] According to certain embodiments of the first and/or second aspect of the invention, the antibiotic drug is at least one of CFT and CPE and a mutation in at least one of the following nucleotide positions is detected with regard to reference genome NC_017671: 4131408, 194882, 1506862, 775975, 2849025, 4065975, 355423, 2263396, 1242591, 1827864, 1556268, 976566, 1227228.

[0156] According to certain embodiments of the first and/or second aspect of the invention, the antibiotic drug is TE and a mutation in at least one of the following nucleotide positions is detected with regard to reference genome NC_017671: 1506862, 22076, 4395988, 4146408, 3120515, 1605192, 800868, 3986074, 740620, 1103580, 2105625, 3721056, 3907377, 1911810, 646078, 2875710, 4392432, 217129, 4722389, 966118, 4398229, 1607396, 3115508, 4397270, 413850, 3860405, 3728481, 2995516, 678940, 4141030, 1292846, 782557, 1150463, 4589465, 4019103, 1315236, 4021595.

[0157] According to certain embodiments of the first and/or second aspect of the invention, the antibiotic drug is at least one of CP and LVX and a mutation in at least one of the following nucleotide positions is detected with regard to reference genome NC_017671: 1058512.

[0158] According to certain embodiments of the first and/or second aspect of the invention, the resistance of a bacterial microorganism belonging to the species Stenotrophomonas against 1, 2, 3, 4, 5, 6, 7, 8, 9, 10, 11, 12, 13, 14, 15 or 16, 17, 18, 19, 20 or 21 antibiotic drugs is determined.

[0159] According to certain embodiments of the first and/or second aspect of the invention, a detected mutation is a mutation leading to an altered amino acid sequence in a polypeptide derived from a respective gene in which the detected mutation is located. According to this aspect, the detected mutation thus leads to a truncated version of the polypeptide (wherein a new stop codon is created by the mutation) or a mutated version of the polypeptide having an amino acid exchange at the respective position.

[0160] According to certain embodiments of the first and/or second aspect of the invention, determining the nucleic acid sequence information or the presence of a mutation comprises determining a partial sequence or an entire sequence of the at least two genes.

[0161] According to certain embodiments of the first and/or second aspect of the invention, determining the nucleic acid sequence information or the presence of a mutation comprises determining a partial or entire sequence of the genome of the Stenotrophomonas species, wherein said partial or entire sequence of the genome comprises at least a partial sequence of said at least two genes.

[0162] According to certain embodiments of the first and/or second aspect of the invention, determining the nucleic acid sequence information or the presence of a mutation comprises using a next generation sequencing or high throughput sequencing method. According to preferred embodiments of the first and/or second aspect of the invention, a partial or entire genome sequence of the bacterial organism of Stenotrophomonas species is determined by using a next generation sequencing or high throughput sequencing method.

[0163] In a further, third aspect, the present invention relates to a method of determining an antimicrobial drug, e.g. antibiotic, resistance profile for bacterial microorganisms of Stenotrophomonas species, comprising:

[0164] obtaining or providing a first data set of gene sequences of a plurality of clinical isolates of Stenotrophomonas species;

[0165] providing a second data set of antimicrobial drug, e.g. antibiotic, resistance of the plurality of clinical isolates of Stenotrophomonas species;

[0166] aligning the gene sequences of the first data set to at least one, preferably one, reference genome of Stenotrophomonas, and/or assembling the gene sequence of the first data set, at least in part;

[0167] analyzing the gene sequences of the first data set for genetic variants to obtain a third data set of genetic variants;

[0168] correlating the third data set with the second data set and statistically analyzing the correlation; and

[0169] determining the genetic sites in the genome of Stenotrophomonas associated with antimicrobial drug, e.g. antibiotic, resistance.

[0170] The different steps can be carried out as described with regard to the method of the first aspect of the present invention.

[0171] When referring to the second data set, wherein the second data set e.g. comprises, respectively is, a set of antimicrobial drug, e.g. antibiotic, resistances of a plurality of clinical isolates, this can, within the scope of the invention, also refer to a self-learning data base that, whenever a new sample is analyzed, can take this sample into the second data set and thus expand its data base. The second data set thus does not have to be static and can be expanded, either by external input or by incorporating new data due to self-learning. This is, however, not restricted to the third aspect of the invention, but applies to other aspects of the invention that refer to a second data set, which does not necessarily have to refer to antimicrobial drug resistance. The same applies, where applicable, to the first data set, e.g. in the third aspect.

[0172] According to certain embodiments, statistical analysis in the present methods is carried out using Fisher's test with p<10⁻⁶, preferably p<10⁻⁹, particularly p<10^{—10}, particularly p<10⁻¹¹.

[0173] The method of the third aspect of the present invention, as well as related methods, e.g. according to the 7^{th} and 10^{th} aspect, can, according to certain embodiments, comprise correlating different genetic sites to each other, e.g. in at least two, three, four, five, six, seven, eight, nine or ten genes. This way even higher statistical significance can be achieved.

[0174] According to certain embodiments of the method of the third aspect and related methods—as above, the second data set is provided by culturing the clinical isolates of Stenotrophomonas species on agar plates provided with antimicrobial drugs, e.g. antibiotics, at different concentrations and the second data is obtained by taking the minimal concentration of the plates that inhibits growth of the respective Stenotrophomonas species.

[0175] According to certain embodiments of the method of the third aspect and related methods, the antibiotic is at least one selected from the group of β-lactams, β-lactam inhibitors, quinolines and derivatives thereof, aminoglycosides, tetracyclines, and folate synthesis inhibitors, preferably Amoxicillin/K Clavulanate, Ampicillin, Aztreonam, Cefazolin, Cefepime, Cefotaxime, Ceftazidime, Ceftriaxone, Cefuroxime, Cephalothin, Ciprofloxacin, Ertapenem, Gentamicin, Imipenem, Levofloxacin, Meropenem, Piperacillin/Tazobactam, Ampicillin/Sulbactam, Tetracycline, Tobramycin, and Trimethoprim/Sulfamethoxazole.

[0176] According to certain embodiments of the method of the third aspect and related methods, the gene sequences in the third data set are comprised in at least one gene from the group of genes consisting of SMD_3200, SMD_3579, SMD_3610, SMD_4135, SMD_3493, SMD_0995, SMD_2708, cbpD, SMD_2457, SMD_2911, gspL, SMD_2447, SMD_0184, SMD_1120, SMD_4120, SMD_0498, recF, fliK, rtcB, SMD_0069, SMD_1911, SMD_1996, glgX, SMD_4066, SMD_3568, ku, gcd, SMD_3572, SMD_3603, SMD_2199, SMD_2221, thiC, SMD_3992, SMD_3982, SMD_1353, StmPrl, SMD_3983, SMD_2572, tolA, SMD_1351, cyoA2, SMD_1123, SMD_1926, SMD_3570, SMD_2620, SMD_2277, SMD_1205, SMD_1639, SMD_2575, and SMD_1320, or from the group of genes consisting of SMD_3691, SMD_0155, glnD, SMD_0669, SMD_2553, SMD_3631, aspC, SMD_0301, SMD_2035, SMD_1117, SMD_1654, SMD_3927, nth, SMD_0861, SMD_1105, SMD_3707, fpr, petB, SMD_0692, SMD_3559, ftsW, yceG, SMD_1902, poxB, SMD_3500, SMD_1737, pepA, adi, hmgA, SMD_0173, SMD_4199, SMD_0947, ppk, SMD_3929, sspB, SMD_2800, SMD_3928, fadL, selD, otsA, SMD_2693, xpsD, atpG, SMD_1163, SMD_0676, SMD_1030, mgtE2, engB, uvrA, and dsbA2, or from the genes listed in Table 5.

[0177] According to certain embodiments of the method of the third aspect and related methods, the genetic sites in the genome of Stenotrophomonas associated with antimicrobial drug, e.g. antibiotic, resistance are at least comprised in one gene from the group of genes consisting of SMD_3691, SMD_0155, glnD, SMD_0669, SMD_2553, SMD_3631, aspC, SMD_0301, SMD_2035, SMD_1117, SMD_1654, SMD_3927, nth, SMD_0861, SMD_1105, SMD_3707, fpr, petB, SMD_0692, SMD_3559, ftsW, yceG, SMD_1902, poxB, SMD_3500, SMD_1737, pepA, adi, hmgA, SMD_0173, SMD_4199, SMD_0947, ppk, SMD_3929, sspB, SMD_2800, SMD_3928, fadL, selD, otsA, SMD_2693, xpsD, atpG, SMD_1163, SMD_0676, SMD_1030, mgtE2, engB, uvrA, and dsbA2.

[0178] According to certain embodiments of the method of the third aspect and related methods, the genetic variant has a point mutation, an insertion and or deletion of up to four bases, and/or a frameshift mutation, particularly a frameshift mutation or a non-synonymous substitution in YP_006186368.1 or YP_006182939.1.

[0179] A fourth aspect of the present invention relates to a method of determining an antimicrobial drug, e.g. antibiotic, resistance profile for a bacterial microorganism belonging to the species Stenotrophomonas comprising the steps of

[0180] a) obtaining or providing a sample containing or suspected of containing the bacterial microorganism;

[0181] b) determining the presence of a mutation in at least one gene of the bacterial microorganism as determined by the method of the third aspect of the invention;

[0182] wherein the presence of a mutation is indicative of a resistance to an antimicrobial drug, e.g. antibiotic, drug.

[0183] Steps a) and b) can herein be carried out as described with regard to the first aspect, as well as for the following aspects of the invention.

[0184] With this method, any mutations in the genome of Stenotrophomonas species correlated with antimicrobial drug, e.g. antibiotic, resistance can be determined and a thorough antimicrobial drug, e.g. antibiotic, resistance profile can be established.

[0185] A simple read out concept for a diagnostic test as described in this aspect is shown schematically in FIG. 1.

[0186] According to FIG. 1, a sample 1, e.g. blood from a patient, is used for molecular testing 2, e.g. using next generation sequencing (NGS), and then a molecular fingerprint 3 is taken, e.g. in case of NGS a sequence of selected genomic/plasmid regions or the whole genome is assembled. This is then compared to a reference library 4, i.e. selected sequences or the whole sequence are/is compared to one or more reference sequences, and mutations (SNPs, sequence-gene additions/deletions, etc.) are correlated with susceptibility/reference profile of reference strains in the reference library. The reference library 4 herein contains many genomes and is different from a reference genome. Then the result 5 is reported comprising ID (pathogen identification), i.e. a list of all (pathogenic) species identified in the sample, and AST (antimicrobial susceptibility testing), i.e. a list including a susceptibility/resistance profile for all species listed

[0187] A fifth aspect of the present invention relates to a diagnostic method of determining an infection of a patient with Stenotrophomonas species potentially resistant to antimicrobial drug treatment, which also can be described as method of determining an antimicrobial drug, e.g. antibiotic, resistant Stenotrophomonas infection in a patient, comprising the steps of:

[0188] a) obtaining or providing a sample containing or suspected of containing a bacterial microorganism belonging to the species Stenotrophomonas from the patient;

[0189] b) determining the presence of at least one mutation in at least one gene of the bacterial microorganism belonging to the species Stenotrophomonas as determined by the method of the third aspect of the present invention, wherein the presence of said at least one mutation is indicative of an antimicrobial drug, e.g. antibiotic, resistant Stenotrophomonas infection in said patient.

[0190] Again, steps a) and b) can herein be carried out as described with regard to the first aspect of the present invention.

[0191] According to this aspect, a Stenotrophomonas infection in a patient can be determined using sequencing methods as well as a resistance to antimicrobial drugs, e.g. antibiotics, of the Stenotrophomonas species be determined in a short amount of time compared to the conventional methods.

[0192] In a sixth aspect the present invention relates to a method of selecting a treatment of a patient suffering from an infection with a potentially resistant Stenotrophomonas strain, e.g. an antimicrobial drug, e.g. antibiotic, resistant Stenotrophomonas infection, comprising the steps of:

[0193] a) obtaining or providing a sample containing or suspected of containing a bacterial microorganism belonging to the species Stenotrophomonas from the patient;

[0194] b) determining the presence of at least one mutation in at least one gene of the bacterial microorganism belonging to the species Stenotrophomonas as determined by the method of the third aspect of the invention, wherein the presence of said at least one mutation is indicative of a resistance to one or more antimicrobial, e.g. antibiotic, drugs;

[0195] c) identifying said at least one or more antimicrobial, e.g. antibiotic, drugs; and

[0196] d) selecting one or more antimicrobial, e.g. antibiotic, drugs different from the ones identified in step c) and being suitable for the treatment of a Stenotrophomonas infection.

[0197] This method can be carried out similarly to the second aspect of the invention and enables a fast was to select a suitable treatment with antibiotics for any infection with an unknown Stenotrophomonas species.

[0198] A seventh aspect of the present invention relates to a method of acquiring, respectively determining, an antimicrobial drug, e.g. antibiotic, resistance profile for a bacterial microorganism of Stenotrophomonas species, comprising:

[0199] obtaining or providing a first data set of gene sequences of a clinical isolate of Stenotrophomonas species;

[0200] providing a second data set of antimicrobial drug, e.g. antibiotic, resistance of a plurality of clinical isolates of Stenotrophomonas species;

[0201] aligning the gene sequences of the first data set to at least one, preferably one, reference genome of Stenotrophomonas, and/or assembling the gene sequence of the first data set, at least in part;

[0202] analyzing the gene sequences of the first data set for genetic variants to obtain a third data set of genetic variants of the first data set;

[0203] correlating the third data set with the second data set and statistically analyzing the correlation; and

[0204] determining the genetic sites in the genome of Stenotrophomonas of the first data set associated with antimicrobial drug, e.g. antibiotic, resistance.

[0205] With this method, antimicrobial drug, e.g. antibiotic, resistances in an unknown isolate of Stenotrophomonas can be determined.

[0206] According to certain embodiments, the reference genome of Stenotrophomonas is NC_017671 as annotated at the NCBI. According to certain embodiments, statistical analysis in the present methods is carried out using Fisher's test with p<10⁻⁶, preferably p<10⁻⁹, particularly p<10⁻¹⁰, particularly p<10⁻¹¹. Also, according to certain embodiments, the method further comprises correlating different genetic sites to each other, e.g. in at least two, three, four, five, six, seven, eight, nine or ten genes.

[0207] An eighth aspect of the present invention relates to a computer program product comprising computer executable instructions which, when executed, perform a method according to the third, fourth, fifth, sixth or seventh aspect of the present invention.

[0208] In certain embodiments the computer program product is one on which program commands or program codes of a computer program for executing said method are stored. According to certain embodiments the computer program product is a storage medium. The same applies to the computer program products of the aspects mentioned afterwards, i.e. the eleventh aspect of the present invention. As noted above, the computer program products of the present invention can be self-learning, e.g. with respect to the first and second data sets.

[0209] In order to obtain the best possible information from the highly complex genetic data and develop an optimum model for diagnostic and therapeutical uses as well as the methods of the present invention—which can be applied stably in clinical routine—a thorough in silico analysis can be necessary. The proposed principle is based on a combination of different approaches, e.g. alignment with at least one, preferably more reference genomes and/or assembly of the genome and correlation of mutations found in every sample, e.g. from each patient, with all references and drugs, e.g. antibiotics, and search for mutations which occur in several drug and several strains.

[0210] Using the above steps a list of mutations as well of genes is generated. These can be stored in databases and statistical models can be derived from the databases. The statistical models can be based on at least one or more mutations at least one or more genes. Statistical models that can be trained can be combined from mutations and genes. Examples of algorithms that can produce such models are association Rules, Support Vector Machines, Decision Trees, Decision Forests, Discriminant-Analysis, Cluster-Methods, and many more.

[0211] The goal of the training is to allow a reproducible, standardized application during routine procedures.

[0212] For this, for example, a genome or parts of the genome of a microorganism can be sequenced from a patient to be diagnosed. Afterwards, core characteristics can be derived from the sequence data which can be used to predict resistance. These are the points in the database used for the final model, i.e. at least one mutation or at least one gene, but also combinations of mutations, etc.

[0213] The corresponding characteristics can be used as input for the statistical model and thus enable a prognosis for new patients. Not only the information regarding all resistances of all microorganisms, e.g. of Stenotrophomonas species, against all drugs, e.g. antibiotics, can be integrated in a computer decision support tool, but also corresponding directives (e.g. EUCAST) so that only treatment proposals are made that are in line with the directives.

[0214] A ninth aspect of the present invention relates to the use of the computer program product according to the eighth aspect for acquiring an antimicrobial drug, e.g. antibiotic, resistance profile for bacterial microorganisms of Stenotrophomonas species or in a method of the third aspect of the invention.

[0215] In a tenth aspect a method of selecting a treatment of a patient having an infection with a bacterial microorganism of Stenotrophomonas species, comprising:

[0216] obtaining or providing a first data set comprising a gene sequence of at least one clinical isolate of the microorganism from the patient;

[0217] providing a second data set of antimicrobial drug, e.g. antibiotic, resistance of a plurality of clinical isolates of the microorganism;

[0218] aligning the gene sequences of the first data set to at least one, preferably one, reference genome of the microorganism, and/or assembling the gene sequence of the first data set, at least in part;

[0219] analyzing the gene sequences of the first data set for genetic variants to obtain a third data set of genetic variants of the first data set;

[0220] correlating the third data set with the second data set of antimicrobial drug, e.g. antibiotic, resistance of a plurality of clinical isolates of the microorganism and statistically analyzing the correlation;

[0221] determining the genetic sites in the genome of the clinical isolate of the microorganism of the first data set associated with antimicrobial drug, e.g. antibiotic, resistance; and

[0222] selecting a treatment of the patient with one or more antimicrobial, e.g. antibiotic, drugs different from the ones identified in the determination of the genetic sites associated with antimicrobial drug, e.g. antibiotic, resistance is disclosed.

[0223] Again, the steps can be carried out as similar steps before. In this method, as well as similar ones, no aligning is necessary, as the unknown sample can be directly correlated, after the genome or genome sequences are produced, with the second data set and thus mutations and antimicrobial drug, e.g. antibiotic, resistances can be determined. The first data set can be assembled, for example, using known techniques.

[0224] According to certain embodiments, statistical analysis in the present method is carried out using Fisher's test with p<10⁻⁶, preferably p<10⁻⁹, particularly p<10⁻¹⁰, particularly p<10⁻¹¹. Also, according to certain embodiments, the method further comprises correlating different genetic sites to each other.

[0225] An eleventh aspect of the present invention is directed to a computer program product comprising computer executable instructions which, when executed, perform a method according to the tenth aspect.

[0226] According to a twelfth aspect of the present invention, a diagnostic method of determining an infection of a patient with Stenotrophomonas species potentially resistant to antimicrobial drug treatment, which can also be described as a method of determining an antimicrobial drug, e.g. antibiotic, resistant Stenotrophomonas infection of a patient is disclosed, comprising the steps of:

[0227] a) obtaining or providing a sample containing or suspected of containing at least one Stenotrophomonas species from the patient;

[0228] b) determining the presence of at least one mutation in at least two genes from the group of genes listed in Table 5, wherein the presence of said at least two mutations is indicative of an antimicrobial drug, e.g. antibiotic, resistant Stenotrophomonas infection in said patient.

[0229] A thirteenth aspect of the invention discloses a method of selecting a treatment of a patient suffering from an antimicrobial drug, e.g. antibiotic, resistant Stenotrophomonas infection, comprising the steps of:

[0230] a) obtaining or providing a sample containing or suspected of containing at least one Stenotrophomonas species from the patient;

[0231] b) determining the presence of at least one mutation in at least two genes from the group of genes listed in Table 5, wherein the presence of said at least two mutations is indicative of a resistance to one or more antimicrobial, e.g. antibiotic, drugs;

[0232] c) identifying said at least one or more antimicrobial, e.g. antibiotic, drugs; and

[0233] d) selecting one or more antimicrobial, e.g. antibiotic, drugs different from the ones identified in step c) and being suitable for the treatment of a Stenotrophomonas infection.

[0234] Again, the steps can be carried out as in similar methods before, e.g. as in the first and second aspect of the invention. In the twelfth and thirteenth aspect of the invention, all classes of antibiotics considered in the present method are covered.

[0235] Herein, the genes in Table 5 are the following: SMD_3200, SMD_3579, SMD_3610, SMD_4135, SMD_3493, SMD_0995, SMD_2708, cbpD, SMD_2457, SMD_2911, gspL, SMD_2447, SMD_0184, SMD_1120, SMD_4120, SMD_0498, recF, fliK, rtcB, SMD_0069, SMD_1911, SMD_1996, glgX, SMD_4066, SMD_3568, ku, gcd, SMD_3572, SMD_3603, SMD_2199, SMD_2221, thiC, SMD_3992, SMD_3982, SMD_1353, StmPrl, SMD_3983, SMD_2572, tolA, SMD_1351, cyoA2, SMD_1123, SMD_1926, SMD_3570, SMD_2620, SMD_2277, SMD_1205, SMD_1639, SMD_2575, SMD_1320, SMD_3691, SMD_0155, glnD, SMD_0669, SMD_2553, SMD_3631, aspC, SMD_0301, SMD_2035, SMD_1117, SMD_1654, SMD_3927, nth, SMD_0861, SMD_1105, SMD_3707, fpr, petB, SMD_0692, SMD_3559, ftsW, yceG, SMD_1902, poxB, SMD_3500, SMD_1737, pepA, adi, hmgA, SMD_0173, SMD_4199, SMD_0947, ppk, SMD_3929, sspB, SMD_2800, SMD_3928, fadL, selD, otsA, SMD_2693, xpsD, atpG, SMD_1163, SMD_0676, SMD_1030, mgtE2, engB, uvrA, dsbA2, SMD_0829, actP, SMD_0288, SMD_3418, iroE2, SMD_1847, aroG, lctP, fecR, SMD_2692, SMD_3036, SMD_3190, mutY, pilM, SMD_2276, SMD_0999, SMD_1131, SMD_0229, SMD_1797, apbE, SMD_1989, SMD_1113, SMD_4224, SMD_4233, SMD_1290, feoB, SMD_3029, lctD, pip2, and citM.

TABLE 5
List of genes

| | | | | | |
|---|---|---|---|---|---|
| SMD_3200 | SMD_3579 | SMD_3610 | SMD_4135 | SMD_3493 | SMD_0995 |
| SMD_2708 | cbpD | SMD_2457 | SMD_2911 | gspL | SMD_2447 |
| SMD_0184 | SMD_1120 | SMD_4120 | SMD_0498 | recF | fliK |
| rtcB | SMD_0069 | SMD_1911 | SMD_1996 | glgX | SMD_4066 |
| SMD_3568 | ku | gcd | SMD_3572 | SMD_3603 | SMD_2199 |
| SMD_2221 | thiC | SMD_3992 | SMD_3982 | SMD_1353 | StmPr1 |
| SMD_3983 | SMD_2572 | tolA | SMD_1351 | cyoA2 | SMD_1123 |
| SMD_1926 | SMD_3570 | SMD_2620 | SMD_2277 | SMD_1205 | SMD_1639 |
| SMD_2575 | SMD_1320 | SMD_3691 | SMD_0155 | glnD | SMD_0669 |
| SMD_2553 | SMD_3631 | aspC | SMD_0301 | SMD_2035 | SMD_1117 |
| SMD_1654 | SMD_3927 | nth | SMD_0861 | SMD_1105 | SMD_3707 |
| fpr | petB | SMD_0692 | SMD_3559 | ftsW | yceG |
| SMD_1902 | poxB | SMD_3500 | SMD_1737 | pepA | adi |
| hmgA | SMD_0173 | SMD_4199 | SMD_0947 | ppk | SMD_3929 |
| sspB | SMD_2800 | SMD_3928 | fadL | selD | otsA |
| SMD_2693 | xpsD | atpG | SMD_1163 | SMD_0676 | SMD_1030 |
| mgtE2 | engB | uvrA | dsbA2 | SMD_0829 | actP |
| SMD_0288 | SMD_3418 | iroE2 | SMD_1847 | aroG | lctP |
| fecR | SMD_2692 | SMD_3036 | SMD_3190 | mutY | pilM |
| SMD_2276 | SMD_0999 | SMD_1131 | SMD_0229 | SMD_1797 | apbE |
| SMD_1989 | SMD_1113 | SMD_4224 | SMD_4233 | SMD_1290 | feoB |
| SMD_3029 | lctD | pip2 | citM | | |

[0236] According to certain embodiments, mutations in at least two, three, four, five, six, seven, eight, nine or ten genes are determined in any of the methods of the present invention, e.g. in at least two genes or in at least three genes. Instead of testing only single genes or mutants, a combination of several variant positions can improve the prediction accuracy and further reduce false positive findings that are influenced by other factors. Therefore, it is in particular preferred to determine the presence of a mutation in 2, 3, 4, 5, 6, 7, 8 or 9 (or more) genes selected from Table 5.

[0237] Further, according to certain embodiments, the reference genome of Stenotrophomonas is again NC_017671 as annotated at the NCBI. According to certain embodiments, statistical analysis in the present methods is carried out using Fisher's test with p<10⁻⁶, preferably p<10⁻⁹, particularly p<10⁻¹⁰, particularly p<10⁻¹¹. Also, according to certain embodiments, the method further comprises correlating different genetic sites to each other. Also the other aspects of the embodiments of the first and second aspect of the invention apply.

[0238] According to certain embodiments of the method of the twelfth and/or thirteenth aspect of the present invention, as well as also of the eighteenth aspect of the present invention, the antimicrobial drug is an antibiotic. According to certain embodiments, the antibiotic is a lactam antibiotic and a mutation in at least one of the genes listed in Table 6 is detected, or a mutation in at least one of the positions (denoted POS in the tables) listed in Table 6.

TABLE 6
List for lactam antibiotics

| | | | p-value | genbank protein |
|---|---|---|---|---|
| gene name | POS | antibiotic | (FDR) | accession number |
| SMD_3691 | 4131408 | CAZ; AZT; CFT; CPE; CAX | 3.06509E−33 | YP_006186368.1 |
| SMD_0155 | 194882 | CAZ; AZT; CFT; CPE; CAX | 2.15692E−32 | YP_006182939.1 |
| SMD_0669 | 775975 | CAZ; AZT; CFT; CPE; CAX | 1.67621E−19 | YP_006183435.1 |
| SMD_2553 | 2849025 | CAZ; AZT; CFT; CPE; CAX | 3.65007E−18 | YP_006185264.1 |
| SMD_3631 | 4065975 | CAZ; AZT; CFT; CPE; CAX | 8.30956E−18 | YP_006186308.1 |
| SMD_0301 | 355423 | CAZ; AZT; CFT; CPE; CAX | 2.21492E−16 | YP_006183083.1 |
| SMD_2035 | 2263396 | CAZ; AZT; CFT; CPE; CAX | 1.24688E−15 | YP_006184753.1 |
| SMD_1117 | 1242591 | CAZ; AZT; CFT; CPE; CAX | 4.92147E−15 | YP_006183859.1 |
| SMD_1654 | 1827864 | CAZ; AZT; CFT; CPE; CAX | 1.43089E−14 | YP_006184380.1 |
| nth | 1556268 | CAZ; AZT; CFT; CPE; CAX | 1.91684E−14 | YP_006184125.1 |
| SMD_0861 | 976566 | CAZ; AZT; CFT; CPE; CAX | 2.34963E−14 | YP_006183620.1 |
| SMD_1105 | 1227228 | CAZ; AZT; CFT; CPE; CAX | 1.79895E−13 | YP_006183847.1 |
| SMD_0829 | 938473 | CAZ; CFT; CPE; AUG | 6.68359E−34 | YP_006183588.1 |
| actP | 2163735 | CAZ; CFT; CPE; AUG | 1.16516E−33 | YP_006184678.1 |
| SMD_0288 | 339720 | CAZ; CFT; CPE; AUG | 3.87865E−32 | YP_006183070.1 |

FDR: determined according to FDR (Benjamini Hochberg) method (Benjamini Hochberg, 1995)

[0239] According to certain embodiments of the method of the twelfth and/or thirteenth aspect of the present invention, as well as also of the eighteenth aspect of the present invention, the antibiotic is at least one of CAZ, CFT and CPE and a mutation in at least one of the genes of SMD_3691, SMD_0155, SMD_0669, SMD_2553, SMD_3631, SMD_0301, SMD_2035, SMD_1117, SMD_1654, nth, SMD_0861, SMD_1105, SMD_0829, actP, SMD_0288 is detected, or a mutation in at least one of the positions of 4131408, 194882, 775975, 2849025, 4065975, 355423, 2263396, 1242591, 1827864, 1556268, 976566, 1227228, 938473, 2163735, 339720.

[0240] According to certain embodiments of the method of the twelfth and/or thirteenth aspect of the present invention, as well as also of the eighteenth aspect of the present invention, the antibiotic is at least one of AZT and CAX and a mutation in at least one of the genes of SMD_3691, SMD_0155, SMD_0669, SMD_2553, SMD_3631, SMD_0301, SMD_2035, SMD_1117, SMD_1654, nth, SMD_0861, SMD_1105 is detected, or a mutation in at least one of the positions of 4131408, 194882, 775975, 2849025, 4065975, 355423, 2263396, 1242591, 1827864, 1556268, 976566, 1227228.

[0241] According to certain embodiments of the method of the twelfth and/or thirteenth aspect of the present invention, as well as also of the eighteenth aspect of the present invention, the antibiotic is AUG and a mutation in at least one of the genes of SMD_0829, actP, SMD_0288 is detected, or a mutation in at least one of the positions of 938473, 2163735, 339720.

[0242] According to certain embodiments of the method of the twelfth and/or thirteenth aspect of the present invention, as well as also of the eighteenth aspect of the present invention, the antibiotic is a quinolone antibiotic, particularly a fluoroquinolone antibiotic, and a mutation in at least one of the genes listed in Table 7 is detected, or a mutation in at least one of the positions (denoted POS in the tables) listed in Table 7.

[0243] According to certain embodiments of the method of the twelfth and/or thirteenth aspect of the present invention, as well as also of the eighteenth aspect of the present invention, the antibiotic is Lvx and a mutation in at least one of the genes of SMD_0947, SMD_3418, iroE2, mutY, pilM is detected, or a mutation in at least one of the positions of 1058512, 3811947, 3636526, 1915147, 3823047.

[0244] According to certain embodiments of the method of the twelfth and/or thirteenth aspect of the present invention, as well as also of the eighteenth aspect of the present invention, the antibiotic is CP and a mutation in at least one of the genes of SMD_1847, aroG, lctP, fecR, SMD_2692, SMD_3036, SMD_3190, SMD_2276, SMD_0999, SMD_2447 is detected, or a mutation in at least one of the positions of 2043177, 4271025, 2841007, 2688820, 2994845, 3371856, 3543489,2539872, 1119269, 2727679.

TABLE 7
List for quinolone antibiotics

| | | | p-value | genbank protein |
|---|---|---|---|---|
| gene name | POS | antibiotic | (FDR) | accession number |
| SMD_0947 | 1058512 | CP; LVX | 1.58337E−11 | YP_006183692.1 |
| SMD_3418 | 3811947 | CAZ; | 3.83769E−19 | YP_006186100.1 |
| | | CFT; | | |
| | | LVX | | |
| iroE2 | 3636526 | CAZ; | 6.67677E−18 | YP_006185948.1 |
| | | CFT; | | |
| | | LVX | | |
| SMD_1847 | 2043177 | CP | 6.13124E−12 | YP_006184567.1 |
| aroG | 4271025 | CP | 6.13124E−12 | YP_006186474.1 |
| lctP | 2841007 | CP | 6.5579E−12 | YP_006185257.1 |
| fecR | 2688820 | CP | 3.85329E−11 | YP_006185128.1 |
| SMD_2692 | 2994845 | CP | 3.8591E−11 | YP_006185393.1 |
| SMD_3036 | 3371856 | CP | 5.43297E−11 | YP_006185727.1 |
| SMD_3190 | 3543489 | CP | 5.61682E−11 | YP_006185878.1 |
| mutY | 1915147 | LVX | 7.38899E−11 | YP_006184463.1 |
| pilM | 3823047 | LVX | 1.02111E−10 | YP_006186110.1 |
| SMD_2276 | 2539872 | CP | 1.6946E−10 | YP_006184990.1 |
| SMD_0999 | 1119269 | CP | 1.82051E−10 | YP_006183741.1 |
| SMD_2447 | 2727679 | CP | 1.87673E−10 | YP_006185158.1 |

[0245] According to certain embodiments of the method of the twelfth and/or thirteenth aspect of the present invention, as well as also of the eighteenth aspect of the present invention, the antibiotic is an aminoglycoside antibiotic and a mutation in at least one of the genes listed in Table 8 is detected, or a mutation in at least one of the positions (denoted POS in the tables) listed in Table 8.

[0246] According to certain embodiments of the method of the twelfth and/or thirteenth aspect of the present invention, as well as also of the eighteenth aspect of the present invention, the antibiotic is TO and a mutation in at least one of the genes of SMD_1131, SMD_0229, SMD_1797, apbE, SMD_1989, SMD_1113, SMD_4224, SMD_4233, SMD_1290, feoB, SMD_3029, lctD, pip2, citM, cgb is detected, or a mutation in at least one of the positions of 1255957, 283252, 1981236, 1178000, 2202346, 1238595, 4751740, 4760878, 1255958, 1439001, 2204390, 3363588, 2839288, 2583118, 3974203, 2850340.

TABLE 8
List of aminoglycoside antibiotics

| | | | p-value | genbank protein |
|---|---|---|---|---|
| gene name | POS | antibiotic | (FDR) | accession number |
| SMD_1131 | 1255957 | CAZ; TO; CFT; CPE | 2.21444E−24 | YP_006183873.1 |
| SMD_0229 | 283252 | CAZ; CFT; TO | 5.93789E−21 | YP_006183013.1 |
| SMD_1797 | 1981236 | CAZ; TO; CFT; CPE | 9.88705E−21 | YP_006184517.1 |
| apbE | 1178000 | CAZ; CFT; TO | 1.07697E−20 | YP_006183804.1 |
| SMD_1989 | 2202346 | CAZ; TO; CFT; CPE | 4.45284E−18 | YP_006184707.1 |
| SMD_1113 | 1238595 | CAZ; TO | 2.00468E−12 | YP_006183855.1 |
| SMD_4224 | 4751740 | TO | 8.13873E−12 | YP_006186880.1 |
| SMD_4233 | 4760878 | TO | 3.79537E−11 | YP_006186888.1 |
| SMD_1131 | 1255958 | TO | 3.80594E−11 | YP_006183873.1 |
| SMD_1290 | 1439001 | CAZ; TO | 1.37843E−10 | YP_006184031.1 |
| feoB | 2204390 | TO | 1.57625E−10 | YP_006184710.1 |
| SMD_3029 | 3363588 | TO; CPE | 2.41009E−10 | YP_006185720.1 |
| lctD | 2839288 | TO | 2.7338E−10 | YP_006185255.1 |
| pip2 | 2583118 | TO | 3.16958E−10 | YP_006185037.1 |
| citM | 3974203 | TO | 4.29747E−10 | YP_006186228.1 |
| cgb | 2850340 | TO | 5.92497E−10 | YP_006185265.1 |

[0247] According to certain embodiments of the method of the seventeenth and/or eighteenth aspect of the present invention, the antibiotic is an polyketide antibiotic and a mutation in at least one of the genes listed in Table 9 is detected, or a mutation in at least one of the positions (denoted POS in the tables) listed in Table 9.

[0248] According to certain embodiments of the method of the twelfth and/or thirteenth aspect of the present invention, as well as also of the eighteenth aspect of the present invention, the antibiotic is TE and a mutation in at least one of the genes of glnD, aspC, SMD_3927, SMD_3707, fpr, petB, SMD_0692, SMD_3559, ftsW, yceG, SMD_1902, SMD_0692, poxB, SMD_3500, SMD_1737 is detected, or a mutation in at least one of the positions of 1506862, 22076, 4395988, 4146408, 3120515, 3120516, 1605192, 800868, 3986074, 740620, 1103580, 2105625, 800870, 3721056, 3907377, 1911810.

TABLE 9
List of polyketides, preferably tetracycline

| | | | p-value | genbank protein |
|---|---|---|---|---|
| gene name | POS | antibiotic | (FDR) | accession number |
| glnD | 1506862 | CAZ; | 2.21197E−24 | YP_006184087.1 |
| | | TE; CFT; | | |
| | | CPE | | |
| aspC | 22076 | TE | 2.23696E−17 | YP_006182811.1 |
| SMD_3927 | 4395988 | TE | 1.75663E−14 | YP_006186596.1 |
| SMD_3707 | 4146408 | TE | 2.94678E−13 | YP_006186384.1 |
| fpr | 3120515 | TE | 3.69853E−13 | YP_006185505.1 |
| fpr | 3120516 | TE | 3.69853E−13 | YP_006185505.1 |
| petB | 1605192 | TE | 5.7886E−13 | YP_006184169.1 |
| SMD_0692 | 800868 | TE | 5.79169E−13 | YP_006183458.1 |
| SMD_3559 | 3986074 | TE | 5.82217E−13 | YP_006186237.1 |
| ftsW | 740620 | TE | 6.17456E−13 | YP_006183408.1 |
| yceG | 1103580 | TE | 2.20615E−12 | YP_006183727.1 |
| SMD_1902 | 2105625 | TE | 2.22987E−12 | YP_006184621.1 |
| SMD_0692 | 800870 | TE | 2.58518E−12 | YP_006183458.1 |
| poxB | 3721056 | TE | 2.64985E−12 | YP_006186024.1 |
| SMD_3500 | 3907377 | TE | 2.79605E−12 | YP_006186178.1 |
| SMD_1737 | 1911810 | TE | 4.0785E−12 | YP_006184458.1 |

[0249] A fourteenth aspect of the present invention is directed to a diagnostic method of determining an infection of a patient with Stenotrophomonas species potentially resistant to antimicrobial drug treatment, which can also be described as method of determining an antimicrobial drug, e.g. antibiotic, resistant Stenotrophomonas infection of a patient, comprising the steps of:

[0250] a) obtaining or providing a sample containing or suspected of containing at least one Stenotrophomonas species from the patient;

[0251] b) determining the presence of at least one mutation in at least one gene from the group of genes consisting of SMD_3200, SMD_3579, SMD_3610, SMD_4135, SMD_3493, SMD_0995, SMD_2708, cbpD, SMD_2457, SMD_2911, gspL, SMD_2447, SMD_0184, SMD_1120, SMD_4120, SMD_0498, recF, fliK, rtcB, SMD_0069, SMD_1911, SMD_1996, glgX, SMD_4066, SMD_3568, ku, gcd, SMD_3572, SMD_3603, SMD_2199, SMD_2221, thiC, SMD_3992, SMD_3982, SMD_1353, StmPrl, SMD_3983, SMD_2572, tolA, SMD_1351, cyoA2, SMD_1123, SMD_1926, SMD_3570, SMD_2620, SMD_2277, SMD_1205, SMD_1639, SMD_2575, and SMD_1320, preferably from the group of genes consisting of SMD_3200, SMD_3579, SMD_3610, SMD_4135, SMD_3493, SMD_0995, SMD_2708, cbpD, SMD_2457, SMD_2911, gspL, SMD_2447, SMD_0184, SMD_1120, SMD_4120, SMD_0498, fliK, rtcB, SMD_0069, SMD_1911, SMD_1996, glgX, SMD_4066, SMD_3568, gcd, SMD_3572, SMD_3603, SMD_2199, SMD_2221, SMD_3992, SMD_3982, SMD_1353, StmPrl, SMD_3983, SMD_2572, SMD_1351, cyoA2, SMD_1123, SMD_1926, SMD_3570, SMD_2620, SMD_2277, SMD_1205, SMD_1639, SMD_2575, and SMD_1320,

[0252] or from the group of genes consisting of SMD_3691, SMD_0155, glnD, SMD_0669, SMD_2553, SMD_3631, aspC, SMD_0301, SMD_2035, SMD_1117, SMD_1654, SMD_3927, nth, SMD_0861, SMD_1105, SMD_3707, fpr, petB, SMD_0692, SMD_3559, ftsW, yceG, SMD_1902, poxB, SMD_3500, SMD_1737, pepA, adi, hmgA, SMD_0173, SMD_4199, SMD_0947, ppk, SMD_3929, sspB, SMD_2800, SMD_3928, fadL, selD, otsA, SMD_2693, xpsD, atpG, SMD_1163, SMD_0676, SMD_1030, mgtE2, engB, uvrA, and dsbA2, preferably from the group of genes consisting of SMD_3691, SMD_0155, glnD, SMD_0669, SMD_2553, SMD_3631, aspC, SMD_0301, SMD_2035, SMD_1117, SMD_1654, SMD_3927, nth, SMD_0861, SMD_1105, SMD_3707, fpr, petB, SMD_0692, SMD_3559, ftsW, SMD_1902, poxB, SMD_3500, SMD_1737, adi, hmgA, SMD_0173, SMD_4199, SMD_0947, SMD_3929, sspB, SMD_2800, SMD_3928, selD, SMD_2693, xpsD, SMD_1163, SMD_0676, SMD_1030, mgtE2, and engB, wherein the presence of said at least one mutation is indicative of an antimicrobial drug, e.g. antibiotic, resistant Stenotrophomonas infection in said patient.

[0253] A fifteenth aspect of the present invention is directed to a method of selecting a treatment of a patient suffering from an antimicrobial drug, e.g. antibiotic, resistant Stenotrophomonas infection, comprising the steps of:

[0254] a) obtaining or providing a sample containing or suspected of containing at least one Stenotrophomonas species from the patient;

[0255] b) determining the presence of at least one mutation in at least one gene from the group of genes consisting of SMD_3200, SMD_3579, SMD_3610, SMD_4135, SMD_3493, SMD_0995, SMD_2708, cbpD, SMD_2457, SMD_2911, gspL, SMD_2447, SMD_0184, SMD_1120, SMD_4120, SMD_0498, recF, fliK, rtcB, SMD_0069, SMD_1911, SMD_1996, glgX, SMD_4066, SMD_3568, ku, gcd, SMD_3572, SMD_3603, SMD_2199, SMD_2221, thiC, SMD_3992, SMD_3982, SMD_1353, StmPrl, SMD_3983, SMD_2572, tolA, SMD_1351, cyoA2, SMD_1123, SMD_1926, SMD_3570, SMD_2620, SMD_2277, SMD_1205, SMD_1639, SMD_2575, and SMD_1320, preferably from the group of genes consisting of SMD_3200, SMD_3579, SMD_3610, SMD_4135, SMD_3493, SMD_0995, SMD_2708, cbpD, SMD_2457, SMD_2911, gspL, SMD_2447, SMD_0184, SMD_1120, SMD_4120, SMD_0498, fliK, rtcB, SMD_0069, SMD_1911, SMD_1996, glgX, SMD_4066, SMD_3568, gcd, SMD_3572, SMD_3603, SMD_2199, SMD_2221, SMD_3992, SMD_3982, SMD_1353, StmPrl, SMD_3983, SMD_2572, SMD_1351, cyoA2, SMD_1123, SMD_1926, SMD_3570, SMD_2620, SMD_2277, SMD_1205, SMD_1639, SMD_2575, and SMD_1320,

[0256] or from the group of genes consisting of SMD_3691, SMD_0155, glnD, SMD_0669, SMD_2553, SMD_3631, aspC, SMD_0301, SMD_2035, SMD_1117, SMD_1654, SMD_3927, nth, SMD_0861, SMD_1105, SMD_3707, fpr, petB, SMD_0692, SMD_3559, ftsW, yceG, SMD_1902, poxB, SMD_3500, SMD_1737, pepA, adi, hmgA, SMD_0173, SMD_4199, SMD_0947, ppk, SMD_3929, sspB, SMD_2800, SMD_3928, fadL, selD, otsA, SMD_2693, xpsD, atpG, SMD_1163, SMD_0676, SMD_1030, mgtE2, engB, uvrA, and dsbA2, preferably from the group of genes consisting of SMD_3691, SMD_0155, glnD, SMD_0669, SMD_2553, SMD_3631, aspC, SMD_0301, SMD_2035, SMD_1117, SMD_1654, SMD_3927, nth, SMD_0861, SMD_1105, SMD_3707, fpr, petB, SMD_0692, SMD_3559, ftsW, SMD_1902, poxB, SMD_3500, SMD_1737, adi, hmgA, SMD_0173, SMD_4199, SMD_0947, SMD_3929, sspB, SMD_2800, SMD_3928, selD, SMD_2693, xpsD, SMD_1163, SMD_0676, SMD_1030, mgtE2, and engB, wherein the presence of said at least one mutation is indicative of a resistance to one or more antimicrobial, e.g. antibiotic, drugs;

[0257] c) identifying said at least one or more antimicrobial, e.g. antibiotic, drugs; and

[0258] d) selecting one or more antimicrobial, e.g. antibiotic, drugs different from the ones identified in step c) and being suitable for the treatment of a Stenotrophomonas infection.

[0259] Again, in the fourteenth and the fifteenth aspect the steps correspond to those in the first or second aspect, although only a mutation in at least one gene is determined.

[0260] A sixteenth aspect of the present invention is directed to a method of treating a patient suffering from an antimicrobial drug, e.g. antibiotic, resistant Stenotrophomonas infection, comprising the steps of:

[0261] a) obtaining or providing a sample containing or suspected of containing at least one Stenotrophomonas species from the patient;

[0262] b) determining the presence of at least one mutation in at least one gene from the group of genes consisting of SMD_3200, SMD_3579, SMD_3610, SMD_4135, SMD_3493, SMD_0995, SMD_2708, cbpD, SMD_2457, SMD_2911, gspL, SMD_2447, SMD_0184, SMD_1120, SMD_4120, SMD_0498, recF, fliK, rtcB, SMD_0069, SMD_1911, SMD_1996, glgX, SMD_4066, SMD_3568, ku, gcd, SMD_3572, SMD_3603, SMD_2199, SMD_2221, thiC, SMD_3992, SMD_3982, SMD_1353, StmPrl, SMD_3983, SMD_2572, tolA, SMD_1351, cyoA2, SMD_1123, SMD_1926, SMD_3570, SMD_2620,SMD_2277, SMD_1205, SMD_1639, SMD_2575, and SMD_1320, preferably from the group of genes consisting of SMD_3200, SMD_3579, SMD_3610, SMD_4135, SMD_3493, SMD_0995, SMD_2708, cbpD, SMD_2457, SMD_2911, gspL, SMD_2447, SMD_0184, SMD_1120, SMD_4120, SMD_0498, fliK, rtcB, SMD_0069, SMD_1911, SMD_1996, glgX, SMD_4066, SMD_3568, gcd, SMD_3572, SMD_3603, SMD_2199, SMD_2221, SMD_3992, SMD_3982, SMD_1353, StmPrl, SMD_3983, SMD_2572, SMD_1351, cyoA2, SMD_1123, SMD_1926, SMD_3570, SMD_2620, SMD_2277, SMD_1205, SMD_1639, SMD_2575, and SMD_1320,

[0263] or from the group of genes consisting of SMD_3691, SMD_0155, glnD, SMD_0669, SMD_2553, SMD_3631, aspC, SMD_0301, SMD_2035, SMD_1117, SMD_1654, SMD_3927, nth, SMD_0861, SMD_1105, SMD_3707, fpr, petB, SMD_0692, SMD_3559, ftsW, yceG, SMD_1902, poxB, SMD_3500, SMD_1737, pepA, adi, hmgA, SMD_0173, SMD_4199, SMD_0947, ppk, SMD_3929, sspB, SMD_2800, SMD_3928, fadL, selD, otsA, SMD_2693, xpsD, atpG, SMD_1163, SMD_0676, SMD_1030, mgtE2, engB, uvrA, and dsbA2, preferably from the group of genes consisting of SMD_3691, SMD_0155, glnD, SMD_0669, SMD_2553, SMD_3631, aspC, SMD_0301, SMD_2035, SMD_1117, SMD_1654, SMD_3927, nth, SMD_0861, SMD_1105, SMD_3707, fpr, petB, SMD_0692, SMD_3559, ftsW, SMD_1902, poxB, SMD_3500, SMD_1737, adi, hmgA, SMD_0173, SMD_4199, SMD_0947, SMD_3929, sspB, SMD_2800, SMD_3928, selD, SMD_2693, xpsD, SMD_1163, SMD_0676, SMD_1030, mgtE2, and engB, wherein the presence of said at least one mutation is indicative of a resistance to one or more antimicrobial, e.g. antibiotic, drugs;

[0264] c) identifying said at least one or more antimicrobial, e.g. antibiotic, drugs;

[0265] d) selecting one or more antimicrobial, e.g. antibiotic, drugs different from the ones identified in step c) and being suitable for the treatment of a Stenotrophomonas infection; and

[0266] e) treating the patient with said one or more antimicrobial, e.g. antibiotic, drugs.

[0267] A seventeenth aspect of the present invention is directed to a method of treating a patient suffering from an antimicrobial drug, e.g. antibiotic, resistant Stenotrophomonas infection, comprising the steps of:

[0268] a) obtaining or providing a sample containing or suspected of containing at least one Stenotrophomonas species from the patient;

[0269] b) determining the presence of at least one mutation in at least two genes from the group of genes consisting of SMD_3200, SMD_3579, SMD_3610, SMD_4135, SMD_3493, SMD_0995, SMD_2708, cbpD, SMD_2457, SMD_2911, gspL, SMD_2447, SMD_0184, SMD_1120, SMD_4120, SMD_0498, recF, fliK, rtcB, SMD_0069, SMD_1911, SMD_1996, glgX, SMD_4066, SMD_3568, ku, gcd, SMD_3572, SMD_3603, SMD_2199, SMD_2221, thiC, SMD_3992, SMD_3982, SMD_1353, StmPrl, SMD_3983, SMD_2572, tolA, SMD_1351, cyoA2, SMD_1123, SMD_1926, SMD_3570, SMD_2620, SMD_2277, SMD_1205, SMD_1639, SMD_2575, and SMD_1320, or from the group of genes consisting of SMD_3691, SMD_0155, glnD, SMD_0669, SMD_2553, SMD_3631, aspC, SMD_0301, SMD_2035, SMD_1117, SMD_1654, SMD_3927, nth, SMD_0861, SMD_1105, SMD_3707, fpr, petB, SMD_0692, SMD_3559, ftsW, yceG, SMD_1902, poxB, SMD_3500, SMD_1737, pepA, adi, hmgA, SMD_0173, SMD_4199, SMD_0947, ppk, SMD_3929, sspB, SMD_2800, SMD_3928, fadL, selD, otsA, SMD_2693, xpsD, atpG, SMD_1163, SMD_0676, SMD_1030, mgtE2, engB, uvrA, and dsbA2, wherein the presence of said at least two mutations is indicative of a resistance to one or more antimicrobial, e.g. antibiotic, drugs;

[0270] c) identifying said at least one or more antimicrobial, e.g. antibiotic, drugs;

[0271] d) selecting one or more antimicrobial, e.g. antibiotic, drugs different from the ones identified in step c) and being suitable for the treatment of a Stenotrophomonas infection; and

[0272] e) treating the patient with said one or more antimicrobial, e.g. antibiotic, drugs.

[0273] An eighteenth aspect of the present invention is directed to a method of treating a patient suffering from an antimicrobial drug, e.g. antibiotic, resistant Stenotrophomonas infection, comprising the steps of:

[0274] a) obtaining or providing a sample containing or suspected of containing at least one Stenotrophomonas species from the patient;

[0275] b) determining the presence of at least one mutation in at least two genes from the group of genes listed in Table 5, wherein the presence of said at least two mutations is indicative of a resistance to one or more antimicrobial, e.g. antibiotic, drugs;

[0276] c) identifying said at least one or more antimicrobial, e.g. antibiotic, drugs;

[0277] d) selecting one or more antimicrobial, e.g. antibiotic, drugs different from the ones identified in step c) and being suitable for the treatment of a Stenotrophomonas infection; and

[0278] e) treating the patient with said one or more antimicrobial, e.g. antibiotic, drugs.

[0279] A nineteenth aspect of the present invention is directed to a method of treating a patient suffering from an antimicrobial drug, e.g. antibiotic, resistant Stenotrophomonas infection, comprising the steps of:

[0280] a) obtaining or providing a sample containing or suspected of containing at least one Stenotrophomonas species from the patient;

[0281] b) determining the presence of at least one mutation in at least one gene from the group of genes listed in Table 5, preferably from the group of genes listed in Table 10, wherein the presence of said at least one mutation is indicative of a resistance to one or more antimicrobial, e.g. antibiotic, drugs;

[0282] c) identifying said at least one or more antimicrobial, e.g. antibiotic, drugs;

[0283] d) selecting one or more antimicrobial, e.g. antibiotic, drugs different from the ones identified in step c) and being suitable for the treatment of a Stenotrophomonas infection; and

[0284] e) treating the patient with said one or more antimicrobial, e.g. antibiotic, drugs.

TABLE 10
List of genes

| | | | | | |
|---|---|---|---|---|---|
| SMD_3200 | SMD_3579 | SMD_3610 | SMD_4135 | SMD_3493 | SMD_0995 |
| SMD_2708 | cbpD | SMD_2457 | SMD_2911 | gspL | SMD_2447 |
| SMD_0184 | SMD_1120 | SMD_4120 | SMD_0498 | citM | fliK |
| rtcB | SMD_0069 | SMD_1911 | SMD_1996 | glgX | SMD_4066 |
| SMD_3568 | pip2 | gcd | SMD_3572 | SMD_3603 | SMD_2199 |
| SMD_2221 | lctD | SMD_3992 | SMD_3982 | SMD_1353 | StmPr1 |
| SMD_3983 | SMD_2572 | SMD_3029 | SMD_1351 | cyoA2 | SMD_1123 |
| SMD_1926 | SMD_3570 | SMD_2620 | SMD_2277 | SMD_1205 | SMD_1639 |
| SMD_2575 | SMD_1320 | SMD_3691 | SMD_0155 | glnD | SMD_0669 |
| SMD_2553 | SMD_3631 | aspC | SMD_0301 | SMD_2035 | SMD_1117 |
| SMD_1654 | SMD_3927 | nth | SMD_0861 | SMD_1105 | SMD_3707 |
| fpr | petB | SMD_0692 | SMD_3559 | ftsW | SMD_1290 |
| SMD_1902 | poxB | SMD_3500 | SMD_1737 | SMD_4233 | adi |
| hmgA | SMD_0173 | SMD_4199 | SMD_0947 | SMD_4224 | SMD_3929 |
| sspB | SMD_2800 | SMD_3928 | SMD_1113 | selD | SMD_1989 |
| SMD_2693 | xpsD | apbE | SMD_1163 | SMD_0676 | SMD_1030 |
| mgtE2 | engB | SMD_1797 | SMD_0229 | SMD_0829 | actP |
| SMD_0288 | SMD_3418 | iroE2 | SMD_1847 | aroG | lctP |
| fecR | SMD_2692 | SMD_3036 | SMD_3190 | SMD_1131 | pilM |
| SMD_2276 | SMD_0999 | | | | |

[0285] Also in the sixteenth to nineteenth aspect of the invention, steps a) to d) are analogous to the steps in the method of the second aspect of the present invention. Step e) can be sufficiently carried out without being restricted and can be done e.g. non-invasively.

[0286] A twentieth aspect of the present invention is directed to a diagnostic method of determining an infection of a patient with Stenotrophomonas species potentially resistant to antimicrobial drug treatment, which can also be described as method of determining an antimicrobial drug, e.g. antibiotic, resistant Stenotrophomonas infection of a patient, comprising the steps of:

[0287] a) obtaining or providing a sample containing or suspected of containing at least one Stenotrophomonas species from the patient;

[0288] b) determining the presence of at least one mutation in at least one gene from the group of genes listed in Table 5, preferably from the group of genes listed in Table 10, wherein the presence of said at least one mutation is indicative of an antimicrobial drug, e.g. antibiotic, resistant Stenotrophomonas infection in said patient.

[0289] A twenty-first aspect of the present invention is directed to a method of selecting a treatment of a patient suffering from an antimicrobial drug, e.g. antibiotic, resistant Stenotrophomonas infection, comprising the steps of:

[0290] a) obtaining or providing a sample containing or suspected of containing at least one Stenotrophomonas species from the patient;

[0291] b) determining the presence of at least one mutation in at least one gene from the group of genes listed in Table 5, preferably from the group of genes listed in Table 10, wherein the presence of said at least one mutation is indicative of a resistance to one or more antimicrobial, e.g. antibiotic, drugs;

[0292] c) identifying said at least one or more antimicrobial, e.g. antibiotic, drugs; and

[0293] d) selecting one or more antimicrobial, e.g. antibiotic, drugs different from the ones identified in step c) and being suitable for the treatment of a Stenotrophomonas infection.

[0294] Again, in the twentieth and the twenty-first aspect the steps correspond to those in the first or second aspect, although only a mutation in at least one gene is determined.

### EXAMPLES

[0295] The present invention will now be described in detail with reference to several examples thereof. However, these examples are illustrative and do not limit the scope of the invention.

### Example 1

[0296] Whole genome sequencing was carried out in addition to classical antimicrobial susceptibility testing of the same isolates for a cohort of 519 specimens. This allowed performing genome wide correlation studies to find genetic variants (e.g. point mutations, small insertions and deletion, larger structural variants, plasmid copy number gains, gene dosage effects) in the genome and plasmids that are significantly correlated to the resistance against one or several drugs. The approach also allows for comparing the relevant sites in the genome to each other.

[0297] In the approach the different sources of genetic resistance as well as the different ways of how bacteria can become resistant were covered. By measuring clinical isolates collected in a broad geographical area and across a broad time span of three decades a complete picture going far beyond the rather artificial step of laboratory generated resistance mechanisms was tried to be generated.

[0298] To this end, a set of 21 clinically relevant antimicrobial agents with 5 different modes of action was put together, and the minimally inhibitory concentration (MIC) of the 21 drugs for the Stenotrophomonas isolates was measured.

[0299] The detailed procedure is given in the following:

[0300] Bacterial Strains

[0301] The inventors selected 519 Stenotrophomonas strains from the microbiology strain collection at Siemens Healthcare Diagnostics (West Sacramento, Calif.) for susceptibility testing and whole genome sequencing.

[0302] Antimicrobial Susceptibility Testing (AST) Panels

[0303] Frozen reference AST panels were prepared following Clinical Laboratory Standards Institute (CLSI) recommendations. The following antimicrobial agents (with μg/ml concentrations shown in parentheses) were included in the panels: Amoxicillin/K Clavulanate (0.5/0.25-64/32), Ampicillin (0.25-128), Ampicillin/Sulbactam (0.5/0.25-64/32), Aztreonam (0.25-64), Cefazolin (0.5-32), Cefepime (0.25-64), Cefotaxime (0.25-128), Ceftazidime (0.25-64), Ceftriaxone (0.25-128), Cefuroxime (1-64), Cephalothin (1-64), Ciprofloxacin (0.015-8), Ertepenem (0.12-32), Gentamicin (0.12-32), Imipenem (0.25-32), Levofloxacin (0.25-16), Meropenem (0.12-32), Piperacillin/Tazobactam (0.25/4-256/4), Tetracycline (0.5-64), Tobramycin (0.12-32), and Trimethoprim/Sulfamethoxazole (0.25/4.7-32/608). Prior to use with clinical isolates, AST panels were tested with QC strains. AST panels were considered acceptable for testing with clinical isolates when the QC results met QC ranges described by CLSI16.

[0304] Inoculum Preparation

[0305] Isolates were cultured on trypticase soy agar with 5% sheep blood (BBL, Cockeysville, Md.) and incubated in ambient air at 35±1° C. for 18-24 h. Isolated colonies (4-5 large colonies or 5-10 small colonies) were transferred to a 3 ml Sterile Inoculum Water (Siemens) and emulsified to a final turbidity of a 0.5 McFarland standard. 2 ml of this suspension was added to 25 ml Inoculum Water with Pluronic-F (Siemens). Using the Inoculator (Siemens) specific for frozen AST panels, 5 μl of the cell suspension was transferred to each well of the AST panel. The inoculated AST panels were incubated in ambient air at 35±1° C. for 16-20 h. Panel results were read visually, and minimal inhibitory concentrations (MIC) were determined.

[0306] DNA Extraction

[0307] Four streaks of each Gram-negative bacterial isolate cultured on trypticase soy agar containing 5% sheep blood and cell suspensions were made in sterile 1.5 ml collection tubes containing 50 μl Nuclease-Free Water (AM9930, Life Technologies). Bacterial isolate samples were stored at −20 ° C. until nucleic acid extraction. The Tissue Preparation System (TPS) (096D0382-02_01_B, Siemens) and the VERSANT® Tissue Preparation Reagents (TPR) kit (10632404B, Siemens) were used to extract DNA from these bacterial isolates. Prior to extraction, the bacterial isolates were thawed at room temperature and were pelleted at 2000 G for 5 seconds. The DNA extraction protocol DNAext was used for complete total nucleic acid extraction of 48 isolate samples and eluates, 50 μl each, in 4 hours. The total nucleic acid eluates were then transferred into 96-Well qPCR Detection Plates (401341, Agilent Technologies) for RNase A digestion, DNA quantitation, and plate DNA concentration standardization processes. RNase A (AM2271, Life Technologies) which was diluted in nuclease-free water following manufacturer's instructions was added to 50 μl of the total nucleic acid eluate for a final working concentration of 20 μg/ml. Digestion enzyme and eluate mixture were incubated at 37° C. for 30 minutes using Siemens VERSANT® Amplification and Detection instrument. DNA from the RNase digested eluate was quantitated using the Quant-iT™ PicoGreen dsDNA Assay (P11496, Life Technologies) following the assay kit instruction, and fluorescence was determined on the Siemens VERSANT® Amplification and Detection instrument. Data analysis was performed using Microsoft® Excel 2007. 25 μl of the quantitated DNA eluates were transferred into a new 96-Well PCR plate for plate DNA concentration standardization prior to library preparation. Elution buffer from the TPR kit was used to adjust DNA concentration. The standardized DNA eluate plate was then stored at −80° C. until library preparation.

[0308] Next Generation Sequencing

[0309] Prior to library preparation, quality control of isolated bacterial DNA was conducted using a Qubit 2.0 Fluorometer (Qubit dsDNA BR Assay Kit, Life Technologies) and an Agilent 2200 TapeStation (Genomic DNA ScreenTape, Agilent Technologies). NGS libraries were prepared in 96 well format using NexteraXT DNA Sample Preparation Kit and NexteraXT Index Kit for 96 Indexes (Illumina) according to the manufacturer's protocol. The resulting sequencing libraries were quantified in a qPCR-based approach using the KAPA SYBR FAST qPCR MasterMix Kit (Peqlab) on a ViiA 7 real time PCR system (Life Technologies). 96 samples were pooled per lane for paired-end sequencing (2×100 bp) on Illumina Hiseq2000 or Hiseq2500 sequencers using TruSeq PE Cluster v3 and TruSeq SBS v3 sequncing chemistry (Illumina). Basic sequencing quality parameters were determined using the FastQC quality control tool for high throughput sequence data (Babraham Bioinformatics Institute).

[0310] Data Analysis

[0311] Raw paired-end sequencing data for the 519 Stenotrophomonas samples were mapped against the Stenotrophomonas reference (NC_017671) with BWA 0.6.1.20. The resulting SAM files were sorted, converted to BAM files, and PCR duplicates were marked using the Picard tools package 1.104 (http://picard.sourceforge.net/). The Genome Analysis Toolkit 3.1.1 (GATK)21 was used to call SNPs and indels for blocks of 200 Stenotrophomonas samples (parameters: -ploidy 1 -glm BOTH -stand_call_conf 30 -stand_emit_conf 10). VCF files were combined into a single file and quality filtering for SNPs was carried out (QD<2.0∥FS>60.0∥MQ<40.0) and indels (QD<2.0 ∥FS>200.0). Detected variants were annotated with SnpEff22 to predict coding effects. For each annotated position, genotypes of all Stenotrophomonas samples were considered. Stenotrophomonas samples were split into two groups, low resistance group (having lower MIC concentration for the considered drug), and high resistance group (having higher MIC concentrations) with respect to a certain MIC concentration (breakpoint). To find the best breakpoint all thresholds were evaluated and p-values were computed with Fisher's exact test relying on a 2×2 contingency table (number of Stenotrophomonas samples having the reference or variant genotype vs. number of samples belonging to the low and high resistance group). The best computed breakpoint was the threshold yielding the lowest p-value for a certain genomic position and drug. For further analyses positions with non-synonymous alterations and p-value<10⁻¹⁰ were considered.

[0312] Since a potential reason for drug resistance is gene duplication, gene dose dependency was evaluated. For each sample the genomic coverage for each position was determined using BED Tools. Gene ranges were extracted from the reference assembly NC_017671.gff and the normalized median coverage per gene was calculated. To compare low- and high-resistance isolates the best area under the curve (AUC) value was computed. Groups of at least 20% of all samples having a median coverage larger than zero for that gene and containing more than 15 samples per group were considered in order to exclude artifacts and cases with AUC>0.75 were further evaluated.

[0313] To include data on the different ways how resistance mechanisms are acquired Stenotrophomonas isolates collected over more than three decades were analyzed such that also horizontal gene transfer could potentially be discovered.

[0314] In detail, the following steps were carried out: Stenotrophomonas strains to be tested were seeded on agar plates and incubated under growth conditions for 24 hours. Then, colonies were picked and incubated in growth medium in the presence of a given antibiotic drug in dilution series under growth conditions for 16-20 hours. Bacterial growth was determined by observing turbidity.

[0315] Next mutations were searched that are highly correlated with the results of the phenotypic resistance test.

[0316] For sequencing, samples were prepared using a Nextera library preparation, followed by multiplexed sequencing using the Illuminat HiSeq 2500 system, paired end sequencing. Data were mapped with BWA (Li H. and Durbin R. (2010) Fast and accurate long-read alignment with Burrows-Wheeler Transform. Bioinformatics, Epub. [PMID: 20080505]) and SNP were called using samtools (Li H.*, Handsaker B.*, Wysoker A., Fennell T., Ruan J., Homer N., Marth G., Abecasis G., Durbin R. and 1000 Genome Project Data Processing Subgroup (2009) The Sequence alignment/map (SAM) format and SAMtools. Bioinformatics, 25, 2078-9. [PMID: 19505943]).

[0317] As reference genome, NC_017671 as annotated at the NCBI was determined as best suited.

[0318] The mutations were matched to the genes and the amino acid changes were calculated. Using different algorithms (SVM, homology modeling) mutations leading to amino acid changes with likely pathogenicity/resistance were calculated.

[0319] In total, whole genomes and plasmids of 519 different clinical isolates of Stenotrophomonas species, particularly Stenotrophomonas maltophilia, were sequenced, and classical antimicrobial susceptibility testing (AST) against 21 therapy forms as described above was performed for all organisms. From the classical AST a table with 519 rows (isolates) and 21 columns (MIC values for 21 drugs) was obtained. Each table entry contained the MIC for the respective isolate and the respective drug. The genetic data were mapped to different reference genomes of Stenotrophomonas that have been annotated at the NCBI (http://www.ncbi.nlm.nih.gov/), and the best reference was chosen as template for the alignment—NC_017671 as annotated at the NCBI. Additionally, assemblies were carried out and it was verified that the sequenced genomes fulfil all quality criteria to become reference genomes.

[0320] Next, genetic variants were evaluated. This approach resulted in a table with the genetic sites in columns and the same isolates in 519 rows. Each table entry contained the genetic determinant at the respective site (A, C, T, G, small insertions and deletions, . . . ) for the respective isolate.

[0321] In a next step different statistical tests were carried out
[0322] 1) For comparing resistance/susceptibility to genetic sites we calculated contingency tables and determined the significance using Fishers test
[0323] 2) For comparing different sites to each other we calculated the correlation between different genetic sites
[0324] 3) For detecting gene dosage effects, e.g. loss or gain of genes (in the genome or on plasmids) we calculated the coverage (i.e. how many read map to the current position) at each site for resistant and not resistant isolates.

[0325] From the data, first the 50 genes with the best p-value were chosen for the list of mutations as well as the list of correlated antibiotic resistance, representing Tables 1 and 2. As can be seen from Tables 1 and 2, differences between the tables can be observed, showing the necessity to carry out both steps for determining statistical significant data for antimicrobial drug, e.g. antibiotic, resistance profiles.

[0326] A full list of all genetic sites, drugs, drug classes, affected genes etc. is provided in Tables 3 and 4a, 4b and 4c, wherein Table 3 corresponds to Table 1 and represents the genes having the lowest p-values after determining mutations in the genes, and Table 4, respectively Tables 4a, 4b and 4c correspond to Table 2 and represent the genes having the lowest p-values after correlating the mutations with antibiotic resistance for the respective antibiotics.

[0327] In addition, the data with the best p-values for each antibiotic class with the most antibiotic drugs as well as each antibiotic, respectively, were evaluated, being disclosed in Tables 5-9.

TABLE 3
Detailed results for the genes in Example 1 (corresponding to Table 1)

| | | | | | genbank protein |
|---|---|---|---|---|---|
| POS | drug class | #drug classes | p-value | gene name | accession number |
| 3557927 | Lactams | 1 | 2.14765E−48 | SMD_3200 | YP_006185888.1 |
| 4007302 | Lactams | 1 | 7.46484E−48 | SMD_3579 | YP_006186257.1 |
| 4041091 | Lactams | 1 | 1.51961E−47 | SMD_3610 | YP_006186287.1 |
| 4641615 | Lactams | 1 | 1.63788E−46 | SMD_4135 | YP_006186801.1 |
| 3901645 | Lactams | 1 | 2.55789E−46 | SMD_3493 | YP_006186171.1 |
| 1114873 | Lactams | 1 | 5.46428E−46 | SMD_0995 | YP_006183737.1 |
| 3012515 | Lactams | 1 | 9.21174E−46 | SMD_2708 | YP_006185409.1 |
| 4561815 | Lactams | 1 | 9.21174E−46 | cbpD | YP_006186728.1 |
| 2737238 | Lactams | 1 | 1.85929E−45 | SMD_2457 | YP_006185168.1 |
| 2737915 | Lactams | 1 | 2.51269E−45 | SMD_2457 | YP_006185168.1 |
| 3237877 | Lactams | 1 | 5.35805E−45 | SMD_2911 | YP_006185609.1 |
| 2685196 | Lactams | 1 | 5.89678E−45 | gspL | YP_006185123.1 |
| 2727935 | Lactams | 1 | 8.89622E−45 | SMD_2447 | YP_006185158.1 |
| 230900 | Lactams | 1 | 9.68687E−45 | SMD_0184 | YP_006182968.1 |
| 1246108 | Lactams | 1 | 1.30996E−44 | SMD_1120 | YP_006183862.1 |
| 4624913 | Lactams | 1 | 1.30996E−44 | SMD_4120 | YP_006186787.1 |
| 565544 | Lactams | 1 | 1.64493E−44 | SMD_0498 | YP_006183268.1 |
| 3743 | Lactams | 1 | 1.68869E−44 | recF | YP_006182796.1 |
| 2290079 | Lactams | 1 | 1.81899E−44 | fliK | YP_006184777.1 |
| 4624707 | Lactams | 1 | 1.81899E−44 | SMD_4120 | YP_006186787.1 |
| 2737932 | Lactams | 1 | 2.65421E−44 | SMD_2457 | YP_006185168.1 |
| 4578962 | Lactams | 1 | 2.65421E−44 | rtcB | YP_006186743.1 |
| 88895 | Lactams | 1 | 3.14858E−44 | SMD_0069 | YP_006182861.1 |
| 2736730 | Lactams | 1 | 3.46838E−44 | SMD_2457 | YP_006185168.1 |
| 3901643 | Lactams | 1 | 3.96522E−44 | SMD_3493 | YP_006186171.1 |
| 2113221 | Lactams | 1 | 4.33501E−44 | SMD_1911 | YP_006184630.1 |
| 2207398 | Lactams | 1 | 4.93094E−44 | SMD_1996 | YP_006184714.1 |
| 2692687 | Lactams | 1 | 4.93094E−44 | glgX | YP_006185134.1 |
| 4567013 | Lactams | 1 | 4.93094E−44 | SMD_4066 | YP_006186733.1 |
| 3997485 | Lactams | 1 | 5.19768E−44 | SMD_3568 | YP_006186246.1 |
| 3997701 | Lactams | 1 | 5.83521E−44 | SMD_3568 | YP_006186246.1 |
| 26655 | Lactams | 1 | 5.87613E−44 | ku | YP_006182815.1 |
| 3020959 | Lactams | 1 | 5.91129E−44 | gcd | YP_006185417.1 |
| 4002023 | Lactams | 1 | 6.46057E−44 | SMD_3572 | YP_006186250.1 |
| 4032795 | Lactams | 1 | 7.43995E−44 | SMD_3603 | YP_006186281.1 |
| 88791 | Lactams | 1 | 8.68254E−44 | SMD_0069 | YP_006182861.1 |
| 2455892 | Lactams | 1 | 9.80716E−44 | SMD_2199 | YP_006184913.1 |
| 2470228 | Lactams | 1 | 9.80716E−44 | SMD_2221 | YP_006184935.1 |
| 2736735 | Lactams | 1 | 9.80716E−44 | SMD_2457 | YP_006185168.1 |
| 2736748 | Lactams | 1 | 9.80716E−44 | SMD_2457 | YP_006185168.1 |
| 3923235 | Lactams | 1 | 9.80716E−44 | thiC | YP_006186190.1 |
| 4471203 | Lactams | 1 | 1.02941E−43 | SMD_3992 | YP_006186660.1 |
| 3997839 | Lactams | 1 | 1.11851E−43 | SMD_3568 | YP_006186246.1 |
| 4001908 | Lactams | 1 | 1.11851E−43 | SMD_3572 | YP_006186250.1 |
| 2736904 | Lactams | 1 | 1.12553E−43 | SMD_2457 | YP_006185168.1 |
| 4458076 | Lactams | 1 | 1.17957E−43 | SMD_3982 | YP_006186650.1 |
| 1514781 | Lactams | 1 | 1.2511E−43 | SMD_1353 | YP_006184094.1 |
| 88957 | Lactams | 1 | 1.33057E−43 | SMD_0069 | YP_006182861.1 |
| 846345 | Lactams | 1 | 1.3384E−43 | StmPr1 | YP_006183505.1 |
| 3997896 | Lactams | 1 | 1.44624E−43 | SMD_3568 | YP_006186246.1 |
| 4458551 | Lactams | 1 | 1.47305E−43 | SMD_3983 | YP_006186651.1 |
| 2693885 | Lactams | 1 | 1.4851E−43 | glgX | YP_006185134.1 |
| 2871674 | Lactams | 1 | 1.4851E−43 | SMD_2572 | YP_006185283.1 |
| 2737121 | Lactams | 1 | 1.52073E−43 | SMD_2457 | YP_006185168.1 |
| 203554 | Lactams | 1 | 1.58812E−43 | tolA | YP_006182946.1 |
| 1512298 | Lactams | 1 | 1.59074E−43 | SMD_1351 | YP_006184092.1 |
| 2684693 | Lactams | 1 | 1.59074E−43 | gspL | YP_006185123.1 |
| 4455112 | Lactams | 1 | 1.74416E−43 | cyoA2 | YP_006186647.1 |
| 4624706 | Lactams | 1 | 1.74416E−43 | SMD_4120 | YP_006186787.1 |
| 1249159 | Lactams | 1 | 1.90388E−43 | SMD_1123 | YP_006183865.1 |
| 2128948 | Lactams | 1 | 1.98496E−43 | SMD_1926 | YP_006184644.1 |
| 4000529 | Lactams | 1 | 2.16411E−43 | SMD_3570 | YP_006186248.1 |
| 4458520 | Lactams | 1 | 2.16411E−43 | SMD_3983 | YP_006186651.1 |
| 2915609 | Lactams | 1 | 2.21777E−43 | SMD_2620 | YP_006185324.1 |
| 2540079 | Lactams | 1 | 2.23049E−43 | SMD_2277 | YP_006184991.1 |
| 1334488 | Lactams | 1 | 2.99366E−43 | SMD_1205 | YP_006183947.1 |
| 4459119 | Lactams | 1 | 3.21977E−43 | SMD_3983 | YP_006186651.1 |
| 3997781 | Lactams | 1 | 3.2945E−43 | SMD_3568 | YP_006186246.1 |
| 2694515 | Lactams | 1 | 3.3261E−43 | glgX | YP_006185134.1 |
| 1813212 | Lactams | 1 | 3.36285E−43 | SMD_1639 | YP_006184365.1 |
| 2128949 | Lactams | 1 | 3.6619E−43 | SMD_1926 | YP_006184644.1 |
| 2684936 | Lactams | 1 | 3.6619E−43 | gspL | YP_006185123.1 |
| 2873563 | Lactams | 1 | 3.6619E−43 | SMD_2575 | YP_006185286.1 |
| 1475785 | Lactams | 1 | 3.70175E−43 | SMD_1320 | YP_006184061.1 |

TABLE 4a
Detailed results for the genes in Example 1 (corresponding to Table 2)

| | | | | #drug |
|---|---|---|---|---|
| POS | drug | #drugs | drug class | classes |
| 4131408 | CAZ; AZT; CFT; CPE; CAX | 5 | Lactams | 1 |
| 194882 | CAZ; AZT; CFT; CPE; CAX | 5 | Lactams | 1 |
| 1506862 | CAZ; TE; CFT; CPE | 4 | Polyketide*; Lactams | 2 |
| 775975 | CAZ; AZT; CFT; CPE; CAX | 5 | Lactams | 1 |
| 2849025 | CAZ; AZT; CFT; CPE; CAX | 5 | Lactams | 1 |
| 4065975 | CAZ; AZT; CFT; CPE; CAX | 5 | Lactams | 1 |
| 22076 | TE | 1 | Polyketide* | 1 |
| 355423 | CAZ; AZT; CFT; CPE; CAX | 5 | Lactams | 1 |
| 2263396 | CAZ; AZT; CFT; CPE; CAX | 5 | Lactams | 1 |
| 1242591 | CAZ; AZT; CFT; CPE; CAX | 5 | Lactams | 1 |
| 1827864 | CAZ; AZT; CFT; CPE; CAX | 5 | Lactams | 1 |
| 4395988 | TE | 1 | Polyketide* | 1 |
| 1556268 | CAZ; AZT; CFT; CPE; CAX | 5 | Lactams | 1 |
| 976566 | CAZ; AZT; CFT; CPE; CAX | 5 | Lactams | 1 |
| 1227228 | CAZ; AZT; CFT; CPE; CAX | 5 | Lactams | 1 |
| 4146408 | TE | 1 | polyketide* | 1 |
| 3120515 | TE | 1 | polyketide* | 1 |
| 1605192 | TE | 1 | polyketide* | 1 |
| 800868 | TE | 1 | polyketide* | 1 |
| 3986074 | TE | 1 | polyketide* | 1 |
| 740620 | TE | 1 | polyketide* | 1 |
| 1103580 | TE | 1 | polyketide* | 1 |
| 2105625 | TE | 1 | polyketide* | 1 |
| 3721056 | TE | 1 | polyketide* | 1 |
| 3907377 | TE | 1 | polyketide* | 1 |
| 1911810 | TE | 1 | polyketide* | 1 |
| 646078 | TE | 1 | polyketide* | 1 |
| 2875710 | TE | 1 | polyketide* | 1 |
| 4392432 | TE | 1 | polyketide* | 1 |
| 217129 | TE | 1 | polyketide* | 1 |
| 4722389 | TE | 1 | polyketide* | 1 |
| 1058512 | CP; LVX | 2 | fluoroquinolone | 1 |
| 966118 | TE | 1 | polyketide* | 1 |
| 4398229 | TE | 1 | polyketide* | 1 |
| 1607396 | TE | 1 | polyketide* | 1 |
| 3115508 | TE | 1 | polyketide* | 1 |
| 4397270 | TE | 1 | polyketide* | 1 |
| 413850 | CAZ; TE | 2 | polyketide*; Lactams | 2 |
| 3860405 | TE | 1 | polyketide* | 1 |
| 3728481 | TE | 1 | polyketide* | 1 |
| 2995516 | TE | 1 | polyketide* | 1 |
| 678940 | TE | 1 | polyketide* | 1 |
| 4141030 | TE | 1 | polyketide* | 1 |
| 1292846 | TE | 1 | polyketide* | 1 |
| 782557 | TE | 1 | polyketide* | 1 |
| 1150463 | TE | 1 | polyketide* | 1 |
| 4589465 | TE | 1 | polyketide* | 1 |
| 4019103 | TE | 1 | polyketide* | 1 |
| 1315236 | TE | 1 | polyketide* | 1 |
| 4021595 | TE | 1 | polyketide* | 1 |

*(tetracycline)

TABLE 4b
Detailed results for the genes in Example 1 (corresponding to Table 2, continued)

| | | | | | #significant | #significant other |
|---|---|---|---|---|---|---|
| | best | #significant | #significant | #significant | polyketide | (benzene derived)/ |
| POS | drug | Lactams | fluoroquinolones | aminoglycosides | (tetracycline) | sulfonamide |
| 4131408 | CAZ | 5 | 0 | 0 | 0 | 0 |
| 194882 | CAZ | 5 | 0 | 0 | 0 | 0 |
| 1506862 | CAZ | 3 | 0 | 0 | 1 | 0 |
| 775975 | CAZ | 5 | 0 | 0 | 0 | 0 |
| 2849025 | CAZ | 5 | 0 | 0 | 0 | 0 |
| 4065975 | CAZ | 5 | 0 | 0 | 0 | 0 |
| 22076 | TE | 0 | 0 | 0 | 1 | 0 |
| 355423 | CAZ | 5 | 0 | 0 | 0 | 0 |
| 2263396 | CAX | 5 | 0 | 0 | 0 | 0 |
| 1242591 | CAX | 5 | 0 | 0 | 0 | 0 |
| 1827864 | CAX | 5 | 0 | 0 | 0 | 0 |
| 4395988 | TE | 0 | 0 | 0 | 1 | 0 |
| 1556268 | CAX | 5 | 0 | 0 | 0 | 0 |
| 976566 | CAX | 5 | 0 | 0 | 0 | 0 |
| 1227228 | CAX | 5 | 0 | 0 | 0 | 0 |
| 4146408 | TE | 0 | 0 | 0 | 1 | 0 |
| 3120515 | TE | 0 | 0 | 0 | 1 | 0 |
| 1605192 | TE | 0 | 0 | 0 | 1 | 0 |
| 800868 | TE | 0 | 0 | 0 | 1 | 0 |
| 3986074 | TE | 0 | 0 | 0 | 1 | 0 |
| 740620 | TE | 0 | 0 | 0 | 1 | 0 |
| 1103580 | TE | 0 | 0 | 0 | 1 | 0 |
| 2105625 | TE | 0 | 0 | 0 | 1 | 0 |
| 3721056 | TE | 0 | 0 | 0 | 1 | 0 |
| 3907377 | TE | 0 | 0 | 0 | 1 | 0 |
| 1911810 | TE | 0 | 0 | 0 | 1 | 0 |
| 646078 | TE | 0 | 0 | 0 | 1 | 0 |
| 2875710 | TE | 0 | 0 | 0 | 1 | 0 |
| 4392432 | TE | 0 | 0 | 0 | 1 | 0 |
| 217129 | TE | 0 | 0 | 0 | 1 | 0 |
| 4722389 | TE | 0 | 0 | 0 | 1 | 0 |
| 1058512 | CP | 0 | 2 | 0 | 0 | 0 |
| 966118 | TE | 0 | 0 | 0 | 1 | 0 |
| 4398229 | TE | 0 | 0 | 0 | 1 | 0 |
| 1607396 | TE | 0 | 0 | 0 | 1 | 0 |
| 3115508 | TE | 0 | 0 | 0 | 1 | 0 |
| 4397270 | TE | 0 | 0 | 0 | 1 | 0 |
| 413850 | CAZ | 1 | 0 | 0 | 1 | 0 |
| 3860405 | TE | 0 | 0 | 0 | 1 | 0 |
| 3728481 | TE | 0 | 0 | 0 | 1 | 0 |
| 2995516 | TE | 0 | 0 | 0 | 1 | 0 |
| 678940 | TE | 0 | 0 | 0 | 1 | 0 |
| 4141030 | TE | 0 | 0 | 0 | 1 | 0 |
| 1292846 | TE | 0 | 0 | 0 | 1 | 0 |
| 782557 | TE | 0 | 0 | 0 | 1 | 0 |
| 1150463 | TE | 0 | 0 | 0 | 1 | 0 |
| 4589465 | TE | 0 | 0 | 0 | 1 | 0 |
| 4019103 | TE | 0 | 0 | 0 | 1 | 0 |
| 1315236 | TE | 0 | 0 | 0 | 1 | 0 |
| 4021595 | TE | 0 | 0 | 0 | 1 | 0 |

TABLE 4c
Detailed results for the genes in Example 1
(corresponding to Table 2. continued)

| | | | genbank |
|---|---|---|---|
| POS | p-value | gene name | protein accession number |
| 4131408 | 3.06509E−33 | SMD_3691 | YP_006186368.1 |
| 194882 | 2.15692E−32 | SMD_0155 | YP_006182939.1 |
| 1506862 | 2.21197E−24 | glnD | YP_006184087.1 |
| 775975 | 1.67621E−19 | SMD_0669 | YP_006183435.1 |
| 2849025 | 3.65007E−18 | SMD_2553 | YP_006185264.1 |
| 4065975 | 8.30956E−18 | SMD_3631 | YP_006186308.1 |
| 22076 | 2.23696E−17 | aspC | YP_006182811.1 |
| 355423 | 2.21492E−16 | SMD_0301 | YP_006183083.1 |
| 2263396 | 1.24688E−15 | SMD_2035 | YP_006184753.1 |
| 1242591 | 4.92147E−15 | SMD_1117 | YP_006183859.1 |
| 1827864 | 1.43089E−14 | SMD_1654 | YP_006184380.1 |
| 4395988 | 1.75663E−14 | SMD_3927 | YP_006186596.1 |
| 1556268 | 1.91684E−14 | nth | YP_006184125.1 |
| 976566 | 2.34963E−14 | SMD_0861 | YP_006183620.1 |
| 1227228 | 1.79895E−13 | SMD_1105 | YP_006183847.1 |
| 4146408 | 2.94678E−13 | SMD_3707 | YP_006186384.1 |
| 3120515 | 3.69853E−13 | fpr | YP_006185505.1 |
| 1605192 | 5.7886E−13 | petB | YP_006184169.1 |
| 800868 | 5.79169E−13 | SMD_0692 | YP_006183458.1 |
| 3986074 | 5.82217E−13 | SMD_3559 | YP_006186237.1 |
| 740620 | 6.17456E−13 | ftsW | YP_006183408.1 |
| 1103580 | 2.20615E−12 | yceG | YP_006183727.1 |
| 2105625 | 2.22987E−12 | SMD_1902 | YP_006184621.1 |
| 3721056 | 2.64985E−12 | poxB | YP_006186024.1 |
| 3907377 | 2.79605E−12 | SMD_3500 | YP_006186178.1 |
| 1911810 | 4.0785E−12 | SMD_1737 | YP_006184458.1 |
| 646078 | 4.83567E−12 | pepA | YP_006183337.1 |
| 2875710 | 1.00049E−11 | adi | YP_006185288.1 |
| 4392432 | 1.15168E−11 | hmgA | YP_006186592.1 |
| 217129 | 1.34077E−11 | SMD_0173 | YP_006182957.1 |
| 4722389 | 1.4285E−11 | SMD_4199 | YP_006186855.1 |
| 1058512 | 1.58337E−11 | SMD_0947 | YP_006183692.1 |
| 966118 | 1.62533E−11 | ppk | YP_006183609.1 |
| 4398229 | 1.67748E−11 | SMD_3929 | YP_006186598.1 |
| 1607396 | 1.86958E−11 | sspB | YP_006184172.1 |
| 3115508 | 2.06785E−11 | SMD_2800 | YP_006185501.1 |
| 4397270 | 2.17107E−11 | SMD_3928 | YP_006186597.1 |
| 413850 | 2.51517E−11 | fadL | YP_006183124.1 |
| 3860405 | 3.0546E−11 | selD | YP_006186132.1 |
| 3728481 | 4.22737E−11 | otsA | YP_006186030.1 |
| 2995516 | 4.55742E−11 | SMD_2693 | YP_006185394.1 |
| 678940 | 4.61779E−11 | xpsD | YP_006183358.1 |
| 4141030 | 5.5179E−11 | atpG | YP_006186376.1 |
| 1292846 | 5.98952E−11 | SMD_1163 | YP_006183905.1 |
| 782557 | 6.7015E−11 | SMD_0676 | YP_006183442.1 |
| 1150463 | 7.02925E−11 | SMD_1030 | YP_006183772.1 |
| 4589465 | 8.05304E−11 | mgtE2 | YP_006186751.1 |
| 4019103 | 8.17204E−11 | engB | YP_006186269.1 |
| 1315236 | 8.97531E−11 | uvrA | YP_006183932.1 |
| 4021595 | 9.46823E−11 | dsbA2 | YP_006186272.1 |

[0328] In Tables 3-9 the columns are designated as follows:

[0329] Gene name: affected gene;

[0330] POS: genomic position of the SNP/variant in the Stenotrophomonas reference genome (see above);

[0331] p-value: significance value calculated using Fishers exact test (determined according to FDR (Benjamini Hochberg) method (Benjamini Hochberg, 1995))

[0332] genbank protein accession number: (NCBI) Accession number of the corresponding protein of the genes

[0333] Also the antibiotic/drug classes, the number of significant antibiotics correlated to the mutations (over all antibiotics or over certain classes), as well as the correlated antibiotics are denoted in the Tables.

[0334] The p-value was calculated using the Fisher exact test based on contingency table with 4 fields: #samples Resistant/wild type; #samples Resistant/mutant; #samples not Resistant/wild type; #samples not Resistant/mutant

[0335] The test is based on the distribution of the samples in the 4 fields. Even distribution indicates no significance, while clustering into two fields indicates significance.

[0336] The following results were obtained

[0337] A total of 70.108 different correlations between genetic sites and anti-microbial agents were detected (p-value<10⁻¹¹).

[0338] The biggest part of these were point mutations (i.e. single base exchanges)

[0339] The highest significance reached was 10⁻⁴⁸, respectively 10⁻³³ after correlation. The highest significances were reached for mutations in YP_006186368.1 and YP_006182939.1, respectively, particularly in positions 4131408 and 194882, respectively, with regard to reference genome NC_017671 as annotated at the NCBI. They both are particularly a frame shift mutation or a non-synonymous substitution, particularly a codon change −/C;Agc/Cgc;Agc/Tgc, respectively −/−;gCt/gTt.

[0340] Besides these, insertions or deletions of up to four bases were discovered

[0341] Further, potential genetic tests for four different drug classes relating to resistances were discovered
[0342] β-lactams (includes Penicillins, Cephalosporins,
[0343] Carbapenems, Monobactams)
[0344] Quinolones, particularly Fluoroquinolones
[0345] Aminoglycosides
[0346] Polyketides, particularly Tetracyclines

[0347] Potential genetic tests for the tested drugs/drug combinations were discovered:

[0348] Amoxicillin/Clavulanate, Ampicillin, Ampicillin/Sulbactam, Aztreonam, Cefazolin, Cefepime, Ceftazidime,Cefuroxime, Cephalothin, Imipenem, Piperacillin/Tazobactam, Ciprofloxacin, Levofloxacin, Gentamycin, Tobramycin, Tetracycline, Trimethoprim/Sulfamethoxazol

[0349] Mutations were observed in 3.626 different genes

[0350] While in the tables only the best mutations in each gene are represented, a manifold of different SNPs has been found for each gene. Examples for multiple SNPs for two of the genes given in Table 3 are shown in the following Tables 11 and 12.

TABLE 11
Statistically significant SNPs in gene recF
(genbank protein accession number YP_006182796.1) (headers as
in Tables 3 and 4, respectively)

| | | | drug | | |
|---|---|---|---|---|---|
| POS | drug | #drugs | class | best drug | p-value |
| 3753 | CAZ; CFT; CPE | 3 | Lactams | CAZ | 8.8846E−043 |
| 3743 | CAZ; CFT; CPE | 3 | Lactams | CAZ | 1.6887E−044 |
| 4362 | CAZ; AUG | 2 | Lactams | CAZ | 7.5937E−014 |
| 4682 | CAZ; CFT | 2 | Lactams | CAZ | 9.8620E−024 |
| 4404 | CAZ; CFT; CPE | 3 | Lactams | CAZ | 2.9897E−030 |
| 3704 | AUG | 1 | Lactams | AUG | 4.8768E−018 |
| 4657 | CAZ | 1 | Lactams | CAZ | 1.3475E−012 |
| 4733 | CAZ; CFT | 2 | Lactams | CAZ | 1.4737E−017 |
| 4669 | CAZ; CFT; CPE | 3 | Lactams | CAZ | 2.1126E−035 |
| 4737 | CAZ | 1 | Lactams | CAZ | 3.1691E−012 |
| 4631 | CAZ; CFT | 2 | Lactams | CAZ | 5.6460E−021 |
| 3937 | CAZ; CFT | 2 | Lactams | CAZ | 6.6504E−021 |
| 4399 | CAZ; CFT | 2 | Lactams | CAZ | 7.6947E−024 |
| 4333 | CAZ; CFT; CPE | 3 | Lactams | CAZ | 3.8058E−036 |
| 4371 | AUG | 1 | Lactams | AUG | 1.1852E−010 |
| 4364 | CAZ; CFT; CPE | 3 | Lactams | CAZ | 2.8799E−030 |
| 4681 | CAZ; CFT | 2 | Lactams | CAZ | 1.3393E−029 |

TABLE 12
Statistically significant SNPs in gene ku (genbank
protein accession number YP_006182815.1) (headers as in Tables
3 and 4, respectively)

| | | | | best | |
|---|---|---|---|---|---|
| POS | drug | #drugs | drug class | drug | p-value |
| 26621 | CAZ | 1 | Lactams | CAZ | 1.2518E−013 |
| 26530 | CAZ | 1 | Lactams | CAZ | 7.1276E−010 |
| 26759 | CAZ; CFT; CPE | 3 | Lactams | CAZ | 4.8218E−038 |
| 26709 | CAZ; AUG | 2 | Lactams | CAZ | 1.1176E−012 |
| 26643 | CAZ; CFT; CPE | 3 | Lactams | CAZ | 5.8203E−039 |
| 26545 | CAZ; CFT | 2 | Lactams | CAZ | 8.2832E−020 |
| 26450 | CAZ; CFT; CPE | 3 | Lactams | CAZ | 6.3199E−038 |
| 26786 | AUG | 1 | Lactams | AUG | 8.1410E−011 |
| 26757 | AUG | 1 | Lactams | AUG | 7.4899E−014 |
| 26626 | CAZ; CFT; CPE | 3 | Lactams | CAZ | 5.1434E−032 |
| 26746 | AUG | 1 | Lactams | AUG | 9.2584E−017 |
| 26379 | CAZ; CFT; CPE | 3 | Lactams | CAZ | 2.9376E−033 |
| 26799 | CAZ; AUG | 2 | Lactams | AUG | 2.1465E−013 |
| 26814 | CAZ; CFT; CPE | 3 | Lactams | CAZ | 2.1352E−027 |
| 26655 | CAZ; CFT; CPE | 3 | Lactams | CAZ | 5.8761E−044 |
| 26747 | AUG | 1 | Lactams | AUG | 1.3257E−011 |
| 26815 | AUG | 1 | Lactams | AUG | 2.0795E−015 |
| 26807 | CAZ; CFT | 2 | Lactams | CAZ | 2.3932E−035 |
| 26750 | CAZ | 1 | Lactams | CAZ | 1.9720E−011 |
| 26308 | CAZ; CFT | 2 | Lactams | CAZ | 3.9544E−019 |
| 26763 | AUG | 1 | Lactams | AUG | 6.4641E−010 |

[0351] Similar results were obtained for other genes, also in Table 2, but are omitted for the sake of brevity.

[0352] Further, a synergistic effect of individual SNPs was demonstrated by exhaustively comparing significance levels for association of single SNPs with antibiotic susceptibility/resistance and significance levels for association of combinations of SNPs with antibiotic susceptibility/resistance. For a representative example of 2 SNPs the significance level for synergistic association of two SNPs was improved with the values given in Tables 13 (for combinations of genes in Table 1) and 14 (for combinations of genes in Table 2) compared to the association of either SNP alone, given for exemplary different antibiotics.

TABLE 13
Synergistic increase for association of two SNPs of Table 1

| drug | POS 1 | Ref | Alt | POS 2 | Ref | Alt | Improv [%] |
|---|---|---|---|---|---|---|---|
| T/S | 1246108 | G | A | 2470228 | T | C | 369.4 |
| T/S | 1475785 | C | G | 2470228 | T | C | 449.3 |
| T/S | 1512298 | G | C, T | 2873563 | C | T | 2700.6 |
| T/S | 1512298 | G | C, T | 2470228 | T | C | 5457.7 |
| T/S | 1512298 | G | C, T | 203554 | G | C | 109. |
| T/S | 1512298 | G | C, T | 4458076 | T | A, G | 135.4 |
| T/S | 1512298 | G | C, T | 4455112 | A | C, T | 119.8 |
| T/S | 1514781 | A | C, T | 2915609 | A | C | 286.9 |
| T/S | 1514781 | A | C, T | 2470228 | T | C | 741.6 |
| T/S | 2873563 | C | T | 2915609 | A | C | 188.3 |
| T/S | 2873563 | C | T | 2470228 | T | C | 15622.4 |
| T/S | 2915609 | A | C | 2470228 | T | C | 6929.8 |
| T/S | 2915609 | A | C | 3901645 | G | C | 271.3 |
| T/S | 2915609 | A | C | 355423 | G | A, T; GCAGGTC | 335.0 |
| T/S | 3012515 | T | C | 2470228 | T | C | 493.0 |
| T/S | 2470228 | T | C | 203554 | G | C | 574.0 |
| T/S | 2470228 | T | C | 4567013 | T | A, G | 881.9 |
| T/S | 2470228 | T | C | 4458551 | G | A | 275.5 |
| T/S | 2470228 | T | C | 4458076 | T | A, G | 273.9 |
| T/S | 2470228 | T | C | 4041091 | A | C, T | 867.7 |
| T/S | 2470228 | T | C | 4000529 | C | T | 853.0 |
| T/S | 2470228 | T | C | 2128948 | ATGC | A | 876.7 |
| T/S | 2470228 | T | C | 3743 | A | G | 997.5 |
| T/S | 2470228 | T | C | 3557927 | G | A, C, T | 1078.7 |
| T/S | 2470228 | T | C | 4398229 | C | A | 367.4 |
| T/S | 2470228 | T | C | 3923235 | C | T | 464.5 |
| T/S | 2470228 | T | C | 1813212 | G | A, C | 388.2 |
| T/S | 2470228 | T | C | 846345 | G | A | 386.4 |
| T/S | 2470228 | T | C | 3020959 | C | T | 556.4 |
| T/S | 2470228 | T | C | 4455112 | A | C, T | 331.3 |

POS 1, 2 = position 1, 2 used for combination;
Ref = reference base;
Alt = alternated base in samples;
improv = improvement compared to minimum p-value of single SNP

[0353] For example, the improvement of 331.3% in the last example in Table 13 with positions 2470228 and 4455112 for T/S results from a p-value change from 0.000200735 to 6.05883e-05. Table 14: Synergistic increase for association of two SNPs of

TABLE 2

| drug | POS 1 | Ref | Alt | POS 2 | Ref | Alt | Improv [%] |
|---|---|---|---|---|---|---|---|
| T/S | 1607396 | G | C, T | 4392432 | G | A, T | 616.7 |
| T/S | 1607396 | G | C, T | 4395988 | C | T | 113.4 |
| T/S | 4392432 | G | A, T | 4397270 | G | T, A | 5640.7 |
| T/S | 4395988 | C | T | 4397270 | G | T, A | 223.4 |

POS 1, 2 = position 1, 2 used for combination;
Ref = reference base;
Alt = alternated base in samples;
improv = improvement compared to minimum p-value of single SNP

[0354] For example, the improvement of 223.4% in the last example of Table 14 with positions 4395988 and 4397270 for T/S results from a p-value change from 0.000200735 to 8.98703e-05.

[0355] Again, similar results were obtained for other SNPs in respective genes.

[0356] A genetic test for the combined pathogen identification and antimicrobial susceptibility testing direct from the patient sample can reduce the time-to actionable result significantly from several days to hours, thereby enabling targeted treatment. Furthermore, this approach will not be restricted to central labs, but point of care devices can be developed that allow for respective tests. Such technology along with the present methods and computer program products could revolutionize the care, e.g. in intense care units or for admissions to hospitals in general. Furthermore, even applications like real time outbreak monitoring can be achieved using the present methods.

[0357] Instead of using only single variants, a combination of several variant positions can improve the prediction accuracy and further reduce false positive findings that are influenced by other factors.

[0358] Compared to approaches using MALDI-TOF MS, the present approach has the advantage that it covers almost the complete genome and thus enables us to identify the potential genomic sites that might be related to resistance. While MALDI-TOF MS can also be used to identify point mutations in bacterial proteins, this technology only detects a subset of proteins and of these not all are equally well covered. In addition, the identification and differentiation of certain related strains is not always feasible.

[0359] The present method allows computing a best breakpoint for the separation of isolates into resistant and susceptible groups.

[0360] The inventors designed a flexible software tool that allows to consider—besides the best breakpoints—also values defined by different guidelines (e.g. European and US guidelines), preparing for an application of the GAST in different countries.

[0361] The inventors demonstrate that the present approach is capable of identifying mutations in genes that are already known as drug targets, as well as detecting potential new target sites.

[0362] The current approach enables
[0363] a. Identification and validation of markers for genetic identification and susceptibility/resistance testing within one diagnostic test
[0364] b. validation of known drug targets and modes of action
[0365] c. detection of potentially novel resistance mechanisms leading to putative novel target/secondary target genes for new therapies

1. A diagnostic method of determining an infection of a patient with Stenotrophomonas species potentially resistant to antimicrobial drug, e.g. antibiotic, treatment, comprising the steps of:
a) obtaining or providing a sample containing or suspected of containing at least one Stenotrophomonas species from the patient;
b) determining the presence of at least one mutation in at least two genes from the group of genes consisting of SMD_3200, SMD_3579, SMD_3610, SMD_4135, SMD_3493, SMD_0995, SMD_2708, cbpD, SMD_2457, SMD_2911, gspL, SMD_2447, SMD_0184, SMD_1120, SMD_4120, SMD_0498, recF, fliK, rtcB, SMD_0069, SMD_1911, SMD_1996, glgX, SMD_4066, SMD_3568, ku, gcd, SMD_3572, SMD_3603, SMD_2199, SMD_2221, thiC, SMD_3992, SMD_3982, SMD_1353, StmPrl, SMD_3983, SMD_2572, tolA, SMD_1351, cyoA2, SMD_1123, SMD_1926, SMD_3570, SMD_2620, SMD_2277, SMD_1205, SMD_1639, SMD_2575, and SMD_1320, or from the group of genes consisting of SMD_3691, SMD_0155, glnD, SMD_0669, SMD_2553, SMD_3631, aspC, SMD_0301, SMD_2035, SMD_1117, SMD_1654, SMD_3927, nth, SMD_0861, SMD_1105, SMD_3707, fpr, petB, SMD_0692, SMD_3559, ftsW, yceG, SMD_1902, poxB, SMD_3500, SMD_1737, pepA, adi, hmgA, SMD_0173, SMD_4199, SMD_0947, ppk, SMD_3929, sspB, SMD_2800, SMD_3928, fadL, selD, otsA, SMD_2693, xpsD, atpG, SMD_1163, SMD_0676, SMD_1030, mgtE2, engB, uvrA, and dsbA2, wherein the presence of said at least two mutations is indicative of an infection with an antimicrobial drug, e.g. antibiotic, resistant Stenotrophomonas strain in said patient.

2. A method of selecting a treatment of a patient suffering from an infection with a potentially resistant Stenotrophomonas strain, comprising the steps of:
a) obtaining or providing a sample containing or suspected of containing at least one Stenotrophomonas species from the patient;
b) determining the presence of at least one mutation in at least two genes from the group of genes consisting of SMD_3200, SMD_3579, SMD_3610, SMD_4135, SMD_3493, SMD_0995, SMD_2708, cbpD, SMD_2457, SMD_2911, gspL, SMD_2447, SMD_0184, SMD_1120, SMD_4120, SMD_0498, recF, fliK, rtcB, SMD_0069, SMD_1911, SMD_1996, glgX, SMD_4066, SMD_3568, ku, gcd, SMD_3572, SMD_3603, SMD_2199, SMD_2221, thiC, SMD_3992, SMD_3982, SMD_1353, StmPrl, SMD_3983, SMD_2572, tolA, SMD_1351, cyoA2, SMD_1123, SMD_1926, SMD_3570, SMD_2620, SMD_2277, SMD_1205, SMD_1639, SMD_2575, and SMD_1320, or from the group of genes consisting of SMD_3691, SMD_0155, glnD, SMD_0669, SMD_2553, SMD_3631, aspC, SMD_0301, SMD_2035, SMD_1117, SMD_1654, SMD_3927, nth, SMD_0861, SMD_1105, SMD_3707, fpr, petB, SMD_0692, SMD_3559, ftsW, yceG, SMD_1902, poxB, SMD_3500, SMD_1737, pepA, adi, hmgA, SMD_0173, SMD_4199, SMD_0947, ppk, SMD_3929, sspB, SMD_2800, SMD_3928, fadL, selD, otsA, SMD_2693, xpsD, atpG, SMD_1163, SMD_0676, SMD_1030, mgtE2, engB, uvrA, and dsbA2, wherein the presence of said at least two mutations is indicative of a resistance to one or more antimicrobial, e.g. antibiotic, drugs;
c) identifying said at least one or more antimicrobial, e.g. antibiotic, drugs; and
d) selecting one or more antimicrobial, e.g. antibiotic, drugs different from the ones identified in step c) and being suitable for the treatment of a Stenotrophomonas infection.

3. The method of one or more of the preceding claims, wherein at least a mutation in SMD_3691, particularly in position 4131408, and/or SMD_0155, particularly in position 194882, with regard to reference genome NC_017671 as annotated at the NCBI, is determined.

4. The method of one or more of the preceding claims, wherein the method involves determining the resistance of Stenotrophomonas to one or more antimicrobial, e.g. antibiotic, drugs.

5. The method of any one of claims 1 to 4, wherein the antimicrobial, e.g. antibiotic, drug is selected from lactam antibiotics and the presence of a mutation in the following genes is determined: SMD_3200, SMD_3579, SMD_3610, SMD_4135, SMD_3493, SMD_0995, SMD_2708, cbpD, SMD_2457, SMD_2911, gspL, SMD_2447, SMD_0184, SMD_1120, SMD_4120, SMD_0498, recF, fliK, rtcB, SMD_0069, SMD_1911, SMD_1996, glgX, SMD_4066, SMD_3568, ku, gcd, SMD_3572, SMD_3603, SMD_2199, SMD_2221, thiC, SMD_3992, SMD_3982, SMD_1353, StmPrl, SMD_3983, SMD_2572, tolA, SMD_1351, cyoA2, SMD_1123, SMD_1926, SMD_3570, SMD_2620, SMD_2277, SMD_1205, SMD_1639, SMD_2575, and/or SMD_1320, or SMD_3691, SMD_0155, glnD, SMD_0669, SMD_2553, SMD_3631, SMD_0301, SMD_2035, SMD_1117, SMD_1654, nth, SMD_0861, SMD_1105, and/or fadL; and/or
wherein the antimicrobial, e.g. antibiotic, drug is selected from polyketide antibiotics, preferably tetracycline antibiotics, and the presence of a mutation in the following genes is determined: glnD, aspC, SMD_3927, SMD_3707, fpr, petB, SMD_0692, SMD_3559, ftsW, yceG, SMD_1902, poxB, SMD_3500, SMD_1737, pepA, adi, hmgA, SMD_0173, SMD_4199, ppk, SMD_3929, sspB, SMD_2800, SMD_3928, fadL, selD, otsA, SMD_2693, xpsD, atpG, SMD_1163, SMD_0676, SMD_1030, mgtE2, engB, uvrA, and/or dsbA2; and/or
wherein the antimicrobial, e.g. antibiotic, drug is selected from quinolone antibiotics, preferably fluoroquinolone antibiotics, and the presence of a mutation in the following genes is determined: SMD_0947.

6. The method of one or more of the preceding claims, wherein the antimicrobial drug, e.g. antibiotic drug, is selected from the group consisting of Amoxicillin/K Clavulanate (AUG), Ampicillin (AM), Aztreonam (AZT), Cefazolin (CFZ), Cefepime (CPE), Cefotaxime (CFT), Ceftazidime (CAZ), Ceftriaxone (CAX), Cefuroxime (CRM), Cephalotin (CF), Ciprofloxacin (CP), Ertapenem (ETP), Gentamicin (GM), Imipenem (IMP), Levofloxacin (LVX), Meropenem (MER), Piperacillin/Tazobactam (P/T), Ampicillin/Sulbactam (A/S), Tetracycline (TE), Tobramycin (TO), and Trimethoprim/Sulfamethoxazole (T/S).

7. The method of any one of claims 1 to 6, wherein the antibiotic drug is CAZ and a mutation in at least one of the following nucleotide positions is detected with regard to reference genome NC_017671 as annotated at the NCBI: 4131408, 194882, 1506862, 775975, 2849025, 4065975, 355423, 2263396, 1242591, 1827864, 1556268, 976566, 1227228, 413850; and/or
wherein the antibiotic drug is at least one of AZT and CAX and a mutation in at least one of the following nucleotide positions is detected with regard to reference genome NC_017671: 4131408, 194882, 775975, 2849025, 4065975, 355423, 2263396, 1242591, 1827864, 1556268, 976566, 1227228; and/or
wherein the antibiotic drug is at least one of CFT and CPE and a mutation in at least one of the following nucleotide positions is detected with regard to reference genome NC_017671: 4131408, 194882, 1506862, 775975, 2849025, 4065975, 355423, 2263396, 1242591, 1827864, 1556268, 976566, 1227228; and/or
wherein the antibiotic drug is TE and a mutation in at least one of the following nucleotide positions is detected with regard to reference genome NC_017671: 1506862, 22076, 4395988, 4146408, 3120515, 1605192, 800868, 3986074, 740620, 1103580, 2105625, 3721056, 3907377, 1911810, 646078, 2875710, 4392432, 217129, 4722389, 966118, 4398229, 1607396, 3115508, 4397270, 413850, 3860405, 3728481, 2995516, 678940, 4141030, 1292846, 782557, 1150463, 4589465, 4019103, 1315236, 4021595; and/or
wherein the antibiotic drug is at least one of CP and LVX and a mutation in at least one of the following nucleotide positions is detected with regard to reference genome NC_017671: 1058512.

8. The method of any one of claims 1 to 7, wherein the resistance of a bacterial microorganism belonging to the species Stenotrophomonas against 1, 2, 3, 4, 5, 6, 7, 8, 9, 10, 11, 12, 13, 14, 15 or 16, 17, 18, 19, 20 or 21 antibiotic drugs is determined.

9. The method of one or more of the preceding claims, wherein determining the nucleic acid sequence information or the presence of a mutation comprises determining a partial sequence or an entire sequence of the at least two genes.

10. The method of one or more of the preceding claims, wherein determining the nucleic acid sequence information or the presence of a mutation comprises determining a partial or entire sequence of the genome of the Stenotrophomonas species, wherein said partial or entire sequence of the genome comprises at least a partial sequence of said at least two genes.

11. The method of one or more of the preceding claims, wherein determining the nucleic acid sequence information or the presence of a mutation comprises using a next generation sequencing or high throughput sequencing method, preferably wherein a partial or entire genome sequence of the bacterial organism of Stenotrophomonas species is determined by using a next generation sequencing or high throughput sequencing method.

12. A method of determining an antimicrobial drug, e.g. antibiotic, resistance profile for bacterial microorganisms of Stenotrophomonas species, comprising:
obtaining or providing a first data set of gene sequences of a plurality of clinical isolates of Stenotrophomonas species;
providing a second data set of antimicrobial drug, e.g. antibiotic, resistance of the plurality of clinical isolates of Stenotrophomonas species;
aligning the gene sequences of the first data set to at least one, preferably one, reference genome of Stenotrophomonas, and/or assembling the gene sequence of the first data set, at least in part;
analyzing the gene sequences of the first data set for genetic variants to obtain a third data set of genetic variants;
correlating the third data set with the second data set and statistically analyzing the correlation; and
determining the genetic sites in the genome of Stenotrophomonas associated with antimicrobial drug, e.g. antibiotic, resistance.

13. A diagnostic method of determining an infection of a patient with Stenotrophomonas species potentially resistant to antimicrobial drug treatment, comprising the steps of:
a) obtaining or providing a sample containing or suspected of containing a bacterial microorganism belonging to the species Stenotrophomonas from the patient;
b) determining the presence of at least one mutation in at least one gene of the bacterial microorganism belonging to the species Stenotrophomonas as determined by the method of claim 12, wherein the presence of said at least one mutation is indicative of an infection with an antimicrobial drug resistant Stenotrophomonas strain in said patient.

14. A method of selecting a treatment of a patient suffering from an infection with a potentially resistant Stenotrophomonas strain, comprising the steps of:
a) obtaining or providing a sample containing or suspected of containing a bacterial microorganism belonging to the species Stenotrophomonas from the patient;
b) determining the presence of at least one mutation in at least one gene of the bacterial microorganism belonging to the species Stenotrophomonas as determined by the method of claim 12, wherein the presence of said at least one mutation is indicative of a resistance to one or more antimicrobial drugs;
c) identifying said at least one or more antimicrobial drugs; and
d) selecting one or more antimicrobial drugs different from the ones identified in step c) and being suitable for the treatment of a Stenotrophomonas infection.

15. A method of acquiring an antimicrobial drug, e.g. antibiotic, resistance profile for bacterial microorganisms of Stenotrophomonas species, comprising:
obtaining or providing a first data set of gene sequences of a clinical isolate of Stenotrophomonas species;
providing a second data set of antimicrobial drug, e.g. antibiotic, resistance of a plurality of clinical isolates of Stenotrophomonas species;
aligning the gene sequences of the first data set to at least one, preferably one, reference genome of Stenotrophomonas, and/or assembling the gene sequence of the first data set, at least in part;
analyzing the gene sequences of the first data set for genetic variants to obtain a third data set of genetic variants of the first data set;
correlating the third data set with the second data set and statistically analyzing the correlation; and
determining the genetic sites in the genome of Stenotrophomonas of the first data set associated with antimicrobial drug, e.g. antibiotic, resistance.

16. Computer program product comprising computer executable instructions which, when executed, perform a method according to any one of claims 12 to 15.

The application's sequence listing, which the Patent Office published only in electronic form, follows.

SEQUENCE LISTING (1 sequence)

SEQ ID NO: 1 - DNA, 4769156 bp, Stenotrophomonas maltophilia D457 (residues 1-1,589,719 of 4,769,156)
atggatgcctggtcccgtagtctcgagcgcctcgaagcggagttcccgccggaagacgttcatacctggttgaagccgctgcaggccgatctgcgcgtggacagcctggtgctgtatgcaccgaatgccttcatcgtcgaccaggtccgcgagctgtacctggcccggatccgcgagctgctggcgcatttcgccggtttcagcgacgtttttcttgaaatcggctcgcgcccgcgccctgtggaggcgcagaacgcgccggtttccacgccgtcggcgcatgtgtccagcgaaccgcaggtgcccttcgccggcaatctggacagccactacacgttcgccaacttcgtcgaaggccgcagcaaccagctgggcctggccgccgccttccaggcagcgcagaagccgggcgaccgggcgcacaacccgctgctgctgtacggaggtacgggcctgggcaagacccacctgatgttcgccgccggcaacgccatgcgccaggccaatccaggtgcaaaggtgttgtacctgcgttcggaacagttcttcagcgcgatgatccgggccctgcaggaaaagaccatggatcagttcaagcgccagttccagcaggtggatgcgctgctgatcgatgacatccagttcttcgccggcaaggaccgcacccaggaagagttcttccacaccttcaacgcgttgttcgatggcaagcagcagatcatcctgacctgcgaccgctatccgcgcgaagtcgagggcctggaagcgcgcctgaagtcgcggcttgcctggggcctgtcggtcgcgatcgaaccgccggacttcgagacccgcgccgcgatcgtgctggccaaggcgcgcgaacgcggtgccgagattcccgatgatgttgcgttcctgatcgccaagaagatgcgctccaacgtgcgcgacctcgagggcgcgctgaataccctgaccgcccgcgccaacttcaccggccgcgcgatcaccaccgaattcgcccaggaaaccctgcgcgacctgctgcgcgcccagcagcaggcgatcagcattcccaacatccagaaaaccgttgccgactactacggcctgcagatcaaggatctgctgtcgaagcgtcggacccgctcgctggcccgtccccgccaggtcgccatggccctgaccaaggaactgaccgagcacagcctgcccgagatcggcgacgcctttgccggtcgcgatcacaccacggtgctgcatgcctgccgccagatccggaccctgatggagaccgacggcaagctccgcgaggactgggacaagctgatccggaagctgagcgaatgatgcacggatgccgatgaggcgtcatcgcacaaaacggtgcagaatccggtagcaagcgcgggacacgttgtggataaaaatgccgtttgaaatcgcgccagatttatccacagctttccccaccccttgggggtcggtaatgcagagggtttcgaggtctgaaatacctttaattacaaagacttagcattgttttccagcgattctgtctctaccagcaccaccaagcttttgatttattccacattttttaaagcataggggcacggaaccacatgcgtttcacactgcagcgcgaagcctttctcaagccgttggcacaggtcgtcaacgtggtcgaacgccgccagacccttccggttctggccaatttcctggtccaggtgcagaacggccagctgtcgctgaccggtaccgacctggaagtggagatggtgtcgcggatcgcggttgaagatgcccaggacggcgaaaccaccattcccgcccgcaagctgttcgagatcatccgcgccctgcccgacggcagccggatcaccgtctcgcagaccggagacaagatcaccgtgcaggccggtcgcagccgtttcaccctggccacgctgccttcgaacgacttcccgtcggtggatgaagtggaagccaccgagcgcgtggccatcggtgaggcgaccctgaaggagctgatcgagcgcaccgcgttcgcgatggcccagcaggacgtgcgctactacctcaacggcctgctgttcgacctgcgcggcgatgccctgcgtaccgttgccaccgacggccaccgcctggcgctgtgtgaaaccgatctggccaagcccagcgggtccaagcgccagatcatcgtgccgcgcaagggtgtgaccgaactgcagcgactgctggaaagcggcgatcgcgagatcgagctggaagtcggccgcagccacgtgcgcgtcaagcgcgacgatgtcacctttacctccaagctgatcgacggccgcttcccggactacgaagcggtgattccgatcggtgccgaccgtgaagtgaaggttgatcgcgaagcgctgcgcgcctcgcttcagcgcgccgcgatcctgtccaacgagaagtaccgcggcatccgcgtggaagtctcgccgggcaacctgaagatcagcgcgcacaacccggaacaggaagaagcccaggaagagatcgaagccgacaccacggtcagcgatctggccatcggcttcaacgtgaactacctgctggacgctctctccgcattgcgcgatgaggaagtcattatccagctgcgcgattccaactcctcggcgcttgtacgtgagtccagcagcgagaagtcgcgccacgtggtgatgccgctgcgtctctgacagctgctgttccacgtggaaccgaacgacgcccgggatcttcccgggcgttttttttgcaggttccacgtggagcatcgagaagacgcggttttccggacgacgtcacttccgtcgatgggctcggttgaaatccgttgcctttccgggatgttcgtctcgatcgttgaaaacaggatcgctggatcgtagcaatgacgagtcgcgattgatcgaaagtccaggtgcaggaaccgatactcgtcgcctgtccccagatctggccggacagggaccgatgatcctgcatcgcggcgcgatggacttccctctgcaaacgccgctgtccacagggaagattcgatgcagattggggcaagcctagcttctaaatctgggtataaatctaaagcatggtggtgatggtagagccagatctcgtggaaaaacaccttatctgactgatttaaaagaaatttatgcacctgaaaccccctgtatatcggcctcccagcctgggggggaacctgtggatagtttcgaaggcatggcaaaagggcttttttatccacagattgcccataccttgtgtataagtcatacagggcagctgtggacagcgtggaacgatcggtctgaattctttgaaatctgtggaaccgcccagggcatgggaccgtagatttcaaggaatctgcaggttcatccgctggtactcgtcggcgacgaggcaagcgctgtccacggcatcgcctgaaatcggcgaaatccaaggctcacacccccgctacccttcgcagaatcgaaggatttccgggcttgccgagacccgcatctgctgggatgaggaaacagcgccacgtggaaccagcggtcagggcgcaggcagacctgcggtaactgctccatagctggccggatagctggccgggcacgtccggcttgaccgatgcagtaagctgatgaattccctgcccctctgccgccccgtgcggatggtctttcgcgccccatgcttatccgccgcctcgccctgcaccaactgcgtcgcttcaatgcggtggagctgtcgccccagccgggattgaacctgctgaccggcgacaacggtgccggcaagaccagcgtgctcgaggccctgcacctgatggcctatgggcgcagcttccgtggtcgtgtccgcgatggattggtgcgccagggccaggaagcgctggaaatcttcgtggaatgggacgaacaacgtgccaatcacccgccgcaccgccgaaaggccggcctgcggcacagtggtcaggattggaaggggcgcctggacggcgaagacgtggcccagctcggcaatctgtgcgcagcgcttgcggtagtcacattcgagccaggcagccatgcgttggtcagcggtggtggtgaaccccgccgccgattcctcgattggggcttgttccacgtggaacctgatttcctgtccctgtggcgccggtattcgcgggcactgaaacagcgcaatgccctgctcaagcaaggtggcccgtcgcggatgctggatacctgggatcacgaactggctgaagccggcgaaccgttgaccagccgtcggcagcactacctggagcgtctgcagcagcgcaccgtggcgctggcttccagcctggccccgcagctcggcatccaggcactggaactcagcccgggctggcgtcggcacgagctccctctggccgatgcgctgcttctggcccgggaacgtgaccgccaggccggatacacctcggtcggtccgcaccgggcagactggagcgtggatttccacagcattccgggtcgcgatgcgctgtcccgcggccaggccaagctgacggcattggcctgcctgctggcgcaggccgaggactacgcggaacagcgcggcgaatggccggtgatcgcattggacgatctgggctcggagctggatcgcacccaccaggcgcgggttctgcagcgcctgctcggtgggccggcgcagatcttcatcaccgccaccgaaacgccggcggcgctgcaggaactgacccacatcgcccggttccacgtggaacatgcacagatcgtggctgtgccatagtgggcacaccagggccgctcgaccccggctggtataattcgggttgaaatcctttcattctcggcgcatcgctccaagcggtggccgacctgcggagcctacggcaagcgcaatgagcgacgaacagaacaccccggcaaacaacggcaattacgacgccaacagcatcaccgccctggaaggcctggaggctgtccgcaagcgacccggcatgtacatcggcgacgtgcatgacggcaccggtctgcaccacatggtgttcgaggttgtcgacaactcgatcgacgaagcgctggccggccacgccgaccatgtcgcggtgacgatccacgccgacggctcggtctcggtgtccgacaacggtcgcggcattccgaccggcaagcacgagcagatgagcgccaagctcggtcgcgaagtgtcggctgccgaagtggtgatgaccgtcctgcacgcaggcggcaagttcgacgacaacagctacaaggtgtccggcggcctgcacggcgtcggcgtcagcgtggtcaacgcgctgtcgcagaagctgctggtggacgtgttccagaacggcttccactaccagcaggaattcagcaacggcgccgccgtgaccgcgctggccaagctggaaaccaccaccaagcgcggcaccaccgtgcgcttctggccgtcgaccgtcgccttccacgacaacgtggaattccactacgacatcctggctcgccgcctgcgcgagctgtcgttcctgaactccggcgtcaagatcgtccttgccgacgaacgtggcgatggccgtcgtgatgacttccactacgaaggcggcatccgcagcttcgtggagcatctggcccagctgaagaccccgctgcacccgaacgtcatctcggtcaccggcgagcacaacggcatcgtcgtggatgtggcgttgcagtggaccgactcctaccaggagacgatgtactgcttcaccaacaacattccgcagaaggacggcggcacccaccttgccggcttccgcggtgcgctgacccgtgtgctcaacaactacatcgagcagaacggcatcgccaagcaggccaagatcaacctgaccggcgatgacatgcgcgaaggcatgatcgcggtgctgtcggtgaaggtgccggacccgagcttctccagccagaccaaggaaaaactggtcagctccgacgtgcgcccggcggtggaaaacgccttcggcgcgcgcctggaagagttcctgcaggaaaacccgaacgaagccaaggcgatcgccggcaagatcgtcgacgctgcgcgtgcacgcgaagcggcgcgcaaggcccgcgacctgacgcgccgcaagggcgcgctggatatcgccggcctgccgggcaagctggccgactgccaggaaaaggacccggcgctgtccgaactgttcatcgtcgagggtgactcggcaggtggctcggccaagcagggccgcaaccgcaagaaccaggcggtgctgccgctgcgcggcaagatcctcaacgtggaacgcgcacgcttcgaccgcatgctgtcctccgaccaggtgggtacgctgatcaccgccctgggcaccggcatcggccgtgacgagtacaacccggacaagctgcgttaccacaagatcatcatcatgaccgacgccgacgtcgacggcgcccacatccgcactctgctgctgaccttcttctaccgtcagatgccggagctgatcgagcgcggttatgtctacatcggcctgccgccgctgtacaagatcaagcagggcaagcaggagctgtacctgaaggacgacccggcgctggacagttacctggccagcagtgcggtggaaaacgccgcgctggtgccggccaccggcgaaccgggcatcgaaggcctggcgctggaaaagctgctgctggcctatgccgccgcgctcgattccatcgaacgcaatgcccaccgctatgaccgcaacctgctcgaagcgctggtcgatttcgtgccgatggacatggacagcctgcgcaatgcgggcgaaggcgaaggcctggatgcgctggccaagcgcctcaaccagggcagcctgggcagcccgcgtttcagcctggaactgcaggaggccaacgaggagcgccccgccgccgtgttggtgacccgtcgccacatgggcgaggagcacatccaggtgctgccgctgtcggcgttcgaaagtggcgaactgcgtgcgatccaccaggcctccaagctgctgcacgggctggtgcgcgaaggtgcaacgatttcccgcggcgccaagtcgatcgaagtcgacagcttcgcgaaggcgcagaactggctgctcgaggaggccaagcgcggccgccagatccagcgattcaagggtctgggtgaaatgaatccggagcagttgtgggataccacggtgaacccggagacccgtcgcctgctgcaggtgcgcatcgaggatgcggtcgctgccgaccagatcttcagcaccctgatgggcgatgtggtcgaaccgcgtcgtgacttcatcgaagacaatgcgctgaaggtcgccaacctggatatctgacacaatcgggacctggccggtgcgcggggagctgcaccggccttcgtcccttgaacgcaggtacctgatgtccgcatccgccccggtctccgccgctccgcctccggttccgccgccgtctaccccgccgcgcgccgtggcaccgttggcaggtttcttcatcgacctgggcatcgccgccgtcaccctggtcggcctgagcatggtcaccggactgttctggggcttctaccgtgcgatcgtggtcagccgcgccaacgtcgcggccaatggcggtgcactcacacctgacagcgccggcgcggcggtgggccagcccggggccctggcccagatcctgatggccctgatcgccaccggtggtgccgcgctgctgctgtacttctggcggcgcccggcgagcgccggcgaacgcctggcctcgcgacaggcgctgcagcgtccttccacctggggctggaccctgctggtggccacgctgatcgtggttggcagcaacggcgtcgccttcctttccaagcagttcggcatcgagccggtgccgaccaacgtggaactgatgcagagcgcgatcgcgcgcttcccgttgttcctggtgctgtttgcggtcgttctcgcccccgcctacgaagagctgctgttccgtcgtgtcctgttcgggcgcctgtggcaggccggccgcccctggctgggcctcatcctcagcagcctggcgttcgccctggtccatgaagtgcccggtgtcagcaagaactcgctgctgggcatggcgcagctgtggctggtctacggcggcatgggtgccgccttctgctggctgtaccgccgcaccggcaccctgtgggcggcgatcacggcgcatgcgctgaacaacgcggtggcgctcgccgcaatggtgttcctggggtcaacgtaacgccgtgcccgcttgacgaaagattaagcaggtacgctacacactgcgcacatgaacacgggggcggacccatgaaacaactgctgctggctctagtcatcaccaccgtggtcagtgcctgtgcgaccaccacctcgccaaccggaagacggcagatggtgggcggcgtatcgcaggcacagcttgaccagctcggcgcgcaggcgtttgccgagaccaagcagaaagagaagatcagcaccgatggccgccagaacggctacgtgcagtgcgtggtcaacgcgttggtcgcgcagttgccgcctcagtaccgtggcgtacggtgggagaccgccgtgttcgtcgacaaggaaccgaacgcctttgccctgcccggcggaaaagtgggcgtgaacaccggcattttcaccgtcgccaagaaccaggaccagttggctgccgtgatcggccatgagatcggccatgtcatcgcgcgtcaccacgaagaacgcatcacccggcagatgggcgcgcagaccggcctggccgtgctgggcgcgctggccggtgccgcctatggcgatggcgccgccagcacggtcaaccagctgggtgggatgggcgcgcaggcggccttcctgctgccgggttcgcgcacgcaggaaagcgaggcagacgtgattggccagcggctgatggcgcaggctggattcaacccggcccaggccgtggacctgtggcagaacatgatggccgccagcggcggtcgcagcccgcaatggctgtccacccaccccgatccggccaaccggatccaggagctgcgacgtgatgcaccgggcctgacgccggtctaccagcaggcgcaggcggccgggctgcggccaaagtgcggatgagtgcgcagttctatgctgtattgcagcacataaaacgatttctcacgccatctgtttctgatacgtttggcggctcagatttttctgacagtccgactttgccgctatccggcggttcgatcgaggtgaacgatgattttccgtaaccacaaagctgtgctttccgtcctcgtcgcgaccgccctgaccggcgccgtggtcaccgatgcctttgcgcagtcctcgcgttcctccgaccgtggcagccgcggcggtagcagcaagcaggccaaggccgaaccgctgtacccgaatgcgacccgccaggagccgaccgccaaggcctcggccaagatgggcagcaagctgcagaaaatgatcgacagctacaacaaggaaaagttcccggagacgcgcgaacaggctgacgcgatcctggccgacagcgcttccaacgagtacgacaagtcgctggccgcgcagctggcctcgcaggccgcctaccagaccgacgacgtgccgggcgccatcgcgtatctgaagcaggtgatccagttcaacggcctggacaacaacggccacttccagtcgatgctgatgctgggccagctgcagctgcaggaagacaagaccgccgaaggcctggccaccctggacaagtacttcgcagagagcaagtcgaccaagccggaagagctgatcgccaagggccaggcgctgtaccagctggagcgctaccaggaagcgatcccggtgctgaagcaggccatcgccggcgccgccgagccgaaggacaactggaaccagctgctgatggcggccctgtccgaagccggccagaccggtgaggccgtgcaggccgcagaagcgctggcggccaagaacccgacggacaagaaggcccagctgaatctggccaacatgtacatgcaggctgaccagatgccgaaggccgccgcggtgatggacaagctgcgcagcagcggccagctcactgaagagcgcgagtacaagcagctgtactcgatctatgccaacaccgagaacaaggaaaaggacgtcatcgcggtcatcaacgaagggttgcagaagggcatcctgaagccggattaccaggtctacctggcgctggcccagtcctactactactccgaccaggtgccgcaggcgatcgatgcgtggcagaaggctgccccgctctccaaggacggtgagacctacctgaacctggcacgcgtcctgcatgccgaaggtcgcgtccccgaggccaagcaggccgcccagcaggcgctggcgaagggcgtgaagaaccaggcggatgccaaaaaaatcatcaacctgaagtaagtaggaataacgcctgaatgcctgctcagttgatgcgcaggcgctcaggattggtataagcttggaggttcctgcggtgtcatgcaccgctgatcagggatcccgcccccgggattccggccccactattgagctcttggcgcatgacggaacaactagtcgttcaccggtacgaacaacccgatgacaaggggctgagctggcctcgcatcgtcggcatcgcgtttgtaattgccctgcatctggccgccttcatgatgctcctcattcccgccgtggctcccaaggccgtcgcggagaaggagcgcaacgtcatggtgaccatcgtcgacgcgccgccgccgcccccaccgccgccgccgccgccgccgcaggatactccgccaccgccggtgaagaatctgtcgccgccgaagccgtcgcccgtaccgccgccgccgcaggcgccggtcgtggacgtgccggagccgcgcccgaacgatatcgtcaccccgccgtcgcccccgtcgccgccggctccgccgacctcgatcgaggccagcgtggacatctcgtcgaaggccatgaatccgccgcgctatccgccggccgccttccgcgcgggcatccagggcgaagtgatcctgatcattgatgtcgatgccaacggcaacgtcaccaatgtcacggtggaaaagtccagccgtaaccgcgacctggaccgtgctgcgatggaagcagctcgcaagtggcgcttcaacgccgctgaatctggcggtaagaaggcggcaggtcgcgttcgcgtcccggtcaactttgcgctgaactgatgcgtccgggtggccctccggccacccccgctcccggttcgattgtttagcttagctacaccctttatcaccacacacaacaaaggtaagcgtcatgctgcaggaaattttcatcgccgctgctgccgggggcaatccgtccaacgccctgtcgcagatgggcttcgagcacctgatccacgaaatgaccaccaagccgggtgatttcgcggtttcctgggtcgtgctgctgaccctgatcgccatgtcggccatgtcctggtactggaccgtcatcaacatcttccgtgccacccgcctgaagagcgccgctgaccgcgtcgtcagcctgttctgggacaccccgaacgcgcaggacgccatccgtgcgatggaagagcagccggcttcggagccgttctcgaagatcgccctggacgctgcccaggccgctgcccaccaccagcgcgctgaaggcggtgctaccggcggcgtcggtgagaacctgagccgttcggagttcgtcgaccgcgctctgcgccaggccgtcacccgggaaagcaacaagctgcagtcgggcatgaccctgctggccaccgtcggcgcgaccgctccgttcgtcggtctgctgggtaccgtgtggggcatctacggcgcgctgatcaagatcggtgccaccggctccgcttcgatcgacgccgttgccggcccggtgggtgaagcgctgatcatgaccgcgatcggtctgttcgtcgcaatcccggccgtgttcgccttcaacttcttcagcaagatcaacagcgcgaccatcagcaagttcgataccttcgcgcacgacctgcacgacttcttcgccaccggttcgcgcgtccgctaattgcggcgcgcgtcacccagcgacgaagtaagtagtcaccaagatctagacggagcccgttatggctttcagtagtggtaacagcggcggccccatggccgacatcaacgttacgcccctcgtggacgtgatgctggtgctgctgatcatcttcatcatcacggcgcccctgatgtcccacaaggtcaaggtggatctgccggaagccaacctgatccagaagccggaagatgctgaaaagcgtccgaacccgatcacgctggcagtcaaggaagacggctcgatctactggaacgacgaagaaatcaacaagcagactctcgagtcccgcttggcgaccgccgcacagcagaccccgcagccgccgctgaacctgcgtggtgaccgcaccaccaagatgcgcgtcatcaacgacctgaccaaggtcgcgcaggaacagggcatgctggacgtcggcttcgttgcgaccaaagaaaaggggcaataagccatggcattcagtagtggtggtggcaagggccccatggcagacatcaacgtcacgcccctcgtggacgtgatgctggttctgctgatcatcttcatcgtgaccgcgccgatcatgacgtacccgatcgccgtggacctgccgcagcgcgtgctcaacccaccgccgcagctggtcgaaccgccgccgccgatcgaactgaagatcgacgccagcaaccaggtctcgtggaacaacagcccgatcaataccagcgagctgcagcagcggatggagcaggaggtccagcgtgacccgaccaaccagccggaactgcgcatcgacgccagcccggattccgagtacgacgtgatggccaaggttctggccgccgcgaagaatgctcagatgaagaagatcggatttgtgcagcagtaaacgctacaccgcaatacaacagtcatgacgcgactgcagacgcccctggaaacaggggcgtttttttgtgttctcgtcgtggcgcacgggttggggtcagatcccttttcctgaggaaagggatctgagcccatccgaccccatccggcagcaggcgccgctatgatcggcggatgctcgccctcttcgactccctgcgccattggctcgacggcatcgcccacctcggcacgatcctggcggtggcctacctgctctacctgttcgcgctggcgggctggatcatgctgcagaagcgcgagccggtggccacgctgagctggatcctttcgctggcactgctgccctacctcgggctcttcatctactacctgctggggccgcagaaggtgaagcggcaacggctgcgtcgtggccgtgcacgctcgggcatggagcactacagcgatgtctgcccgcccgattcggactgcaccgagctggccaaggttgcccaggccaccaccggactggcgcccagcagtgccaccgaggtgacctggctggtcgacggcgcagccacctatgccgcgctgctcgacgcgatcgcgcaggcgcgcgaccacgtgcacctggagtactacatcttcaaccccgaccatgccggcaccgcactgcgcgatgccctggtcgaacgtgcgcaggccggtgtgcaggtgcgcctgctgctggatgcggtgggctcttccgccctgccccggcgcttcctgcagccactgctggacgccggcggcgaagcgatctggttccatccgcgacagctgctgaagccgttcaagcgcccgtggctgaacctgcgcacccaccgcaagctggtgatcgtcgacggtcgcctcgccttcaccggcggcatcaacatcactgacgaggaagacgagagccgcaggcccgacgcttaccgcgacctgcacatgcgtatccgcggccacgtggtgcgcagcctgcagctggtgttcgccgaggactggctctatgccagtggccaggaccactcgcgtttcgacatcgcccgcctgtggccggccgacatgccgctgcgtgcggatggatcgatcagcgcccaagtgctggtgtccgggcccgactcgggctgggagaccatccaccgcctgcacgtggcggcgatccaggaagcacacgagcgcgtgtggctggtgacgccctacttcgtgcccggtgaagcagcgaggatggcgctgacctcggccgcgctgggcggcctggacgtgcgcctgctggtgccgaagatgagcgactcctggttcgtcacccaggccgcacggtcctacttcgacgaactgctgcacgcgggcgtgaagatctacgagtacggcccgcgcatgctgcataccaaggcgttcatcgccgacgacgatgtctgcatcgtcggcagcgccaacttcgaccaccgcagcttccggctgaacttcgaactgtcgatgatgatcagcgaccgtgaccgcgtcgctgcactggccgaactgctgcagggcgaattcgaccgttccacgcgggtgcacgaccaggccggccgctcgctgtggctgcaccgcctgcccgaggccttcgcccggctggcctcgccgctgctctgacgcagcgctacactgcggcgatcatccggggagcccgactatgtactggttgtacctgctgctggcgctgggctgctttgccttcgcgctgaagaccccgagcgcggggttgatgaccctgtgcctgctggcggcgctcggcttcctgctggcctgggtgcgcggccgctacgtggcccgtttcggcgacctgcagcgcgacccggccacgctgatcgatgccgaggagctgcgccgcctgcgcgaacaggcccaggcccgccgcactgacgaccacaacgaccacgacccgtcccctctttccaagtagtcccgttccatgacccagctcagcgtcaacgtcaacaagatcgccgtcctgcgcaattcgcgcggcggcgccgaaccggacgtggtgcgtgccgcccaggcctgcctggatgccggcgcgcatggcatcaccgtgcatccacggccggaccgccggcatatcaccgccgaggacgtgctggccctgtccacgctgacccgcgcgcgtggcgttgaattcaacatcgaaggcaatccgttcgcgccgccgcgcgagggctacccggggctgctgccgctgtgcgaacagacccgtccggcgcaggccaccctggtccccgatgatgacggccagatcacctccgaccacggtttcgacttcgaacgcgatgccgagcgcctgcgtccgctggtggctgcgctgaaggccatggggtgtcgggtcagcctgtttgttgacgcgggcaacccattgctggagcaggcagctgaggtgggggcggaccgcatcgagctgtataccgggccctatgcagaggcgcatgcggcgggcgatgccgatgcgatgctggcgctgttcgcaactgctgcccgacgagcgcaggccgtcggcctgggtgtcaatgctggccacgacctgtcgcaggacaatctgcgcgacttcctggcccacgtgccggaggtgctggaggtgtcgatcggtcacgcgctgatcggcgaggcactgtatgacgggctggatgccaccgtgcgcgggtacctggcgctgctctgatgcattgcagccgagcgtaggctcggctccacaaggtctctgcatcaactgtagagccgagtccatgctcggctcagcctcgccctgaacccttcaggcggccgtcgcagccattgagacggccacgacgtaccctgccgcaatgggtattgcgatcaagggccgaggttccacgtcccaccttgccgggcgctttgaaagcaccgtcagcgaggcggtggacgacggctgggcggtcgacgaaagcgatgagttcctcgccccgcgcctgcgcaccgaagtacgcgccgaaaccgcgcgcagcatcatcacccgcaacaactcgcccgacgtcggcttcagtcaatcggtgaatccctaccgcggttgcgagcacggctgctcgtactgcttcgcccgcccttcgcatgcctatctgaacctgtcgccggggctggacttcgagaccaagctgttcgccaagaccaatgcgccgcagctgctgcgcaaggaactgtcgaaaccgggctatgtgccgcagccgatcgcactgggcatcaacaccgatgcgtaccagccgatcgaacgcaagttcaagctgacccgccagctgattgaagtgatgctggagaccaggcatccgttctcgctgatcaccaagaacgcgctggtcgagcgcgacatcgatctgctcgcgccgctggccgcggagaacctggtcagcgtgcacttctcggtgacctcgctggacccgcatctttccgcgaagctggaaccgcgtgcatcagcgccacatgcacggctgcgcgcgatgaagcgcctgcatgacgccggcattccggtcggtgtgatggtggcaccggtgattccctggatcaacgacagcgagctggaagccgtgctggaggctgcgcacggcgcaggtgcgagcaccgccggttacgtgctgctgcgcctgccgctggaagtggcaccgctgttccgcgactggctggatacgcaccatcccgatcgcgctgcgcacgtgatgagcaccatccagcagcagcgcggcggcaaggactacgacagccagttcggcacgcgtatgcgtggccagggcgtgtatgccgatctgttgaacaaccggttcaagctggcacgcaagcgtctgggcttcaatgcacagaacagccattggccgaagctggattgcagccggttccagaagccgctgccgccgaagaaggagtcgccgcagggcagtctgttctagggctctggaccgcagcgcgatccaccggtaacaatccacaccctgccgcatcgcctggtgttgtacacgatgaaatgcagtcactgcttccgtgccagtggtcttcttctctgccttgcgaccctgcaagtccaggcccgcgccctgcacgaatgcatcgtcgttccgcaggccgcggtcgtcactgaaatgccggctggcctggacgagttcgaacaacgtttgtggacagcaaatgcaggtcaggtggtcagcaagggcaccgacacccttcttctgcttcgcctgttctcggaatcaccgggcgtgatggattcccaagagttcaccaaggtcaccggcaccctgtctggatacactccgtcctctgaagggattccggccgtgctcggcgcacgcctgagcagtggcagcgcgggcttcgcgcacaagggagactactggttgtccgattcagcggatatcgaactacatcggccgcacaagggcgacagtcggatcgaagtcaaagtgacggctgttgggtggaacagctatcgaaaggaggaccgttccttctatctccagttcacctgtcaactcgaggagatccccgtcgagaagctcagtgcctggcaaggcggcaacggcaacctcttgggatcctttggacctgccagataatcgagcggatcaacctttacccaatactggcttatttcgatgtatctggaacaatgcgataactgaaatgaagatcatccaccggctcggcatcgcgttcctttggatgcttccactgaactttcttctgctgacgactgccaagctgatgtcaggaaacgcgcttgggaacgaagaactcgtgggcttcggcgtcgccctctttggtctgatggcgggagggattctctatcgccgccgccctcggtagaggtgagttcgttcgaccgtggtccgggtccagtgctgagaaagcattgactggaggtcctggcatggcagccttgaagagtggcggagctctcctggggcatcacagagccaaggcagtcagaatcatttctgactggacgaccgctcgcggcggattcaaggcactgggtacatcatccgcggtaaggcgactgtgcgaggaacttatggcaccgcgaaaaagcaggaaaagagatccaggattgccagtcgtccagcactggtttgtgcgatcgcgatttggagagtgatgaagattctactttgggtacctgttggtttatttgctttgctgtcattgagagcaatcgcgttcgtcgcctatcaagggctaaatggaactgccttcgaggaagaggaaatcattgtcgcggggatcggattggtctgcggctggatcgcctgggtcatgcacaagacattgatcaggccaggtaggaagccgagaccctgattctgagccggtggttccgggcgagctggtcggtgtcgaccgccgtggtttcgacgcgagcgatataaaaaattcgcaccgtacaagtagatgtttctggggagcgcgactgtgcgaacgagattgttgattgcgcttgttctaggcttgagctgcagcgcgtgcgcgtcgctgcttcctggtagccataagatcagcgccttctacgtgtctaacgccaactctgatgtgaccggctgcgaaaggtctgactacagggaaatttcacttgcgtgccatcggattgttgatggcgacaatgtcgtagtggcattgcgcgagtacacagcgaccaagattgagaatgaaagatacaggaagctgacattgatccttcccccgaatctggcggagggcgatgtcttcagtttgacggagggtgatatcagggcgttctacagcactggccttagcctgagacctggcagcactggatgctacggaaaggccgtttcaggcagcgtcgaaatcctcaggaaatccaatgatctgatgcagcttcgcatcaacgcgcgctttgatctcgatagccccgcgggctggaaggaccactgcaagatgcgcgagctcagctatgaactgaatgccatccggagaccgctgggtcaggtgggcgcctgggaaggcgtgcacgcccctggagattctcttatcagcgagggcagcccgagtagcggattgccttaggagatagcaccaactgcccgcacgacagcacaggatctcgggggcccgcttcttgatccggacaagatgctgagaacatcgagtgaccagtttgcttcaccctcctccaaacaacttctgcgcactctggaacaggatccaactggtcgcgatgaacttgtcgccgccctgtggccgattcccgcgatgggtgtgggtgaacgccgtcggggcgatcaacaggctgccggtacgtggcgcgatcttgcggccctggaacatgaactcggtttcgccctcttcgaattcgtcgttgaggtacagcgtccacagcacatgccggtgcagggtctcggcctgcgcatccttcgggtacagctcgcagtgccagtacgggtagccgccctcgcccgccgcataccactgcaggttgatcgcacccgggcgcaggcaggtgcgggccaggtcggccagctgctgctgcggcatgtcggggaagtcctcggcagacaggcgtcgcggttggccgttgctgtcctggatctgcaacatcagtggggcgatcaacgcctgtggataacggcgtagataagtcagcaggccgttgaacaccgcaatctgcagctgctgatcaacatcccgccagccgtccaggccactgatgcgcagatccttgctgtgcttgagttccgggaacacgccactgcccaccgcaccgggcagcaggccacgcgtcgcacgcatgcgctcgacgatcgccgcgcagacctcgctggggacggcgttgtggatgacttcgatgaaatcgaccgggccctgctcgtgcatgcgtgcattccttaggcggcaacggcttgatggtgccgtttgccgccctcggtgtcaccccacggtcatgtcatcgatctgccatgaccgctgtcaggcgatcggttgtcagccctgtgcgtcgtcgtgtgcgtggtggtagcgcacggcctcggccacttcctcgcgcgaaccgaggaacaccggcacgcgctggtgcagctggtcgggctggatgtcgaggatgcgctcgcggccggtccaggcggcaccgccggcctgctcgaccagcaggcccatcgggttggcttcgtacatcaggcgcagcttgccggccttggacgggtccttcttgtcccacgggtagatgaagatgccgccgcgggtcaggatgcgatgcacgtcggccaccatgctggcgatccagcgcatgttgaagttcttgccgcgtacgccttccttgcccgccagcaggtcgccgacgtaggcctgcatcggcgcttcccagtggcgctggttggacatgttgatcgcgaattcctgggtggccgccgggatctgcatgttctcggtggtcagcacgaactcgcccttctcgcggtccagggtgaaggcgtgggtgccatggccgacggtcagcaccagctgggtgctgggcccgtagatgcagtagccggcggcgatctgcttgctgcccggctgcaggaaggcgtcgtcgcccggcagctcgacattggtcgggcagcgcagcacggagaagatggtgccgacggagacgttgacgtcgatgttggagctgccatcgaggggatcgaacagcagcaggaaatcaccgcggggatagatgtccggcaccggctggctgtggtccatttcctccgaggcgcaggcggcgaggtggccaccccaggcgttggcttcgagcaggatctcgttgctgatgacgtcgagcttcttctgcgcttcaccctgcacgttgccggtaccggcgtcgccgagcacgccaccgagggcgcccttgctgacggcgatggagatgctggtgcaggcgcgggcgacgaccgcgatcagctggcgcaggtcggcattgatgcggccggcgtgctgttcctggatcaggaagcgggtcaacgaagtacgggacatgagcgggcaggtctcggcagcgggaaaacgcctattgtcgcccgtctggcgggggcgtgcgtgagcgcgggaaggcgtaatcgtttccagatgcgttgcgctcgtggcgccttccttccgtggagccgagcccgcgctcggctgctcttcgtccttcatgccgcacaagccgagcgtaggctcggctctacagagaccagggcgcaaaaaacaaaggcgcctttcggcgcctttgtcctcaagctactggagcgttgcttcagcccttggcgacggtggccacggccttggcgacgtattccaggttgttctggttcagcgcggccacgcagatacggccggtgccgacggcgtagatgccgaactcgtcgcgcaggcgctcgacctgctcacggctcaggccggagtaggagaacatgccggcctgctcgttgatgaaaccgaactgcggtgcaccggcagcggccagcttctcgaccaggccgtggcgcagggcgtggatgcgctcgcgcatctcggtcagctcctgctcccacatcgcacgcagttccgggttggtcagcacgccggccaccagtgcagcgccgtgggtggatgggctggagtagatggtgcggatcacgcgcttgacctgcgattgcacggccttggcgtcagcggcggtcggcgccaccatcgacagcgcacccacgcgctcgccatacagcgagaacgacttggagtacgagttggcgacgatgaagctgtcgatgccggcttcggcgatgatgcgcaccgctgcgccgtcctgctcgatgcccttgtcgaagccctggtaggccatgtcgatgaaggggaacagctgcttgtccttcagcagttgcgcgacctgcttccactgggtgaccgtgaggtcagcgccggtggggttgtggcagcaggcgtgcagcagcaccacggtgccggcttccagcttgcccaggtcggccagcatgccgtcgaaatcgacgccatgggtgcccgggtcgaagtaggtgtaatccagcacctcgaaaccagcggcgctgaacaccgcacggtggttttcccagctcgggttgctcagcgcaacggtggcgtgcggcagcagcttcttcagcacgtcggcgccgacgcgcagcgcaccgctgccaccaacggtctgcgcggtggtcacgcggccggcggccagcagcggcgaatccttgccgaacaccagctcacgcgtcgcttgcgtgtacgccggcaggccatcgatcggcaggtagccgcgcggtttggcttcagcggcgagctgctgctcgatctgcttgacggcgcgcagcagcggaatgcggccgctctcgtcgtagtagatgcccacacccaggttgaccttggtcgggcggctgtcggcgttgtacgcctcggtcaggcccaggatcgggtcgcctgggaccagttccacgtttgcaaagaaggacacggcggtactcgttcggtagacggaaagggggaggaagtgcgctacgcggtccgcggcttttcggccggaaacagcccatcgtaacaaagcctgccggggctggccgccgccatcgtcatccgcggccccgtaccatggcgtgcgttgccgcccgatccatcaacctgaatcatgaatcccgccgcacgacgccgttgcctgccgctgtccgccctgctgctgtcgccttggacggcggtggccgagcctgcgcccaccgccctgcctgcggtgcaggtacaggccgcccgggtgccgggcatcgatccgttcgcgctgccggccagccaggacacggtctggatcgacgccagccgcgcgggcaccggtgcgcagctgtctgaggccttggccggggtccccggactgctggcacgtgaccggcggaacttcgcccaggacacgcagctgtcgattcgtggcttcggcgcacgctcgaccttcggcgtgcgcggggtgcgggtgctgatcgacggcgtgccggccaccatgcctgacggccagggccagctgtcgcatgccagcctgttgggcgccgagcgcatcgaggtgctgcgcgggccgttctcggccctgtacggcaattcctccggcggcgtgctgcaggtctggagcgcgcagggccaggccggtgacccgtggcggttgcgcgtgaatgccggcgccgacaacacgctcagtgtcggcgcacagctcaagggtgccggcccagcgctggactacaacatcgcggccaaccacttccgcaccgatggctggcgggaccacagccgtgcgcgccgcgaatcgctcaacgcacgcattggtggtgatctgggcggtgggcggctggagctgctgctcaatgcgctggatgcccccgatgcgcaggatccgctgggcctgagccgtgcccaggtggcggctgatccgcgccaggccacggcagtcgcgcaccagtacaacacccgcaaatcggtgcgccagcagcaggctggcctgcgctggacccgggagaccggggcacagcgctggcaattgatgggctatgccggccaacgcacggtgacccaatacctgccgattccgccggcaccccagaccaacagcccgctgcatgccggcggcgtgatcgatctgcagggcgggtatggcgggctggacgcgcgctggggctggcacggcgacctcgccggccggccgctggacctggtggccgggctcagcgccgaccgccagcgccagcaccgcaccggctacgagaacttcgtgggcagcgccctcggggtgcgcgggcgcctgcgccgtgaccagatcgataccgtgcagaacgtggaccagttcgcccaggcctggtggcaatggagtccgcgctggtcgctgctggccggggtgcgccacagcgcggtgcgtttcgactcggacgatcgctacatcaccacccgcaacccggatgacagtggccaccggcgctaccaggcgaccacgccggtggcaggcgtcagcttcgaggccagcccgcagtggcgcctgcatgccgccgtggggcgtggattcgagacccccaccttcaacgagctggggtatcgcgccgatggtcaggcgggtctggcgctggatctggcggccgcccgcagccgcagcctggagctaggcagcaagtggcacgcacaggatggaacccagctcgatgtcagcctgttccgtgcagataccgacgatgagctggcagttgccagcaatatcggcggtcgcagcacgtatcgcaacatcggccgcacccgccgccagggtgtggaactgcagtatcgccagccgctggccgagcagctgcagctgcagctggcgtggacctggctgcaggcgcaggcgcgttcgccgtacctcacctccaacaccctggttgccgccggcagccgcctgcccggggtaccgcgccagcaggcctttgcccggctgcaatggtcgcccggccagtggcagtgggcgctggaggcctccgccagcagtgataccgtagtcaacgacgtggcgaccgaacgcgcgcccggcttcgccctgctgcatctggaaggcggccgtcgctgggccctgccgggtggcgagctgcgcgccttcgcccggatggagaacgtgctggaccaggcctacataggctcggtgatcgtcaacgatggcaacgggcgcttctacgaaccgggaccgggacggcgggccaacgtcggcctgcaatggtcgtggcgttgaaggggtagtgccggccgctggccggcattgcgccgtgcaggacgtcaggaggttgccggccagcggccggcactacccgtcagtcgggggccttggctggcacgaacggcgatgtcgggtcgctggccgggaaggtctcctccagcgcttcgtcctggttgtcgctggcgcgctgcttgcgttcgcggcgcttgagcgggctttcctggccaccgcgatggcggtcaccgccatccttgcggtcctgcgccgcctgttcagcctcgtgcttcaccggcagatggtcgctcccgtgctcggcatcgaagaacggtgcgccggtgccacggtagtcggcgttgtcggcatcgcgtttgccgcgctgctcgcccggaatgggcgggtggtttgcgcgcagcgggtcgcgggaggtctctcggctcatgctctggctacctgcgctcggggttcccactacaccgcgacgcaggtaaagccgccgcgaacctggcgtcatgaacatctcgctcacccgctggtaacggcaccgcgcgtattcctgcccacccgcccccgctgcaggagccggccatgccccgtcttgaacgacccgcaccgtccgtgttcaacgccctgctcgatccgctcggccaacgtaccgcgcagcgccgcacgcgccgccatgaggatccgcaggcggtggcccaggactatctgcagtacatgctcagtgactacgaggaacgtcgcgggcaaagtcatcgcaactggcgtgacctgtgcccggtctatgccttcgcgttgacaacccatgctgccgactggccgcgcggcgacgctgccgatacctgcgaggaattggccgagcactgggaacagatgcgcgggcagtcgcggctgggctggtcgcaggcgcggccggtggtggaggacgcctggcgcgcgctggaccatattccggcggcggcggtgaggccgttgctgcagtagtgccggccgctggccggcaaccccaggacacttgaggccgcgagctctgccggccggcggccggcactaccgcacctgcgtggaacccacgtgcacggtatcgacacgggtggtttacaccgcccatccgaagctgggtgccctgccccatcaaaggtgcgtccatggcccgcccgatctggaccggtacgctgtccttcggactgctcaatgtgccggtgtcgctgatgtccggcgaacgcaaggttgacctgcagttccgcatgctcgactcgcgcgatcgcaagccgatccgtttcgaaagggtcaacgccgacaccggcgaggaagtgccctggaaggacatcgtcaaagcctatgagtacgacaagggcagttatgtcgtgctggaggaaggcgacatccgctcggcggcgccggaaagccacgaagcggtggaggtggaatccttcgtggacgcagcgcagatcgacccgcgctactacgagaagccgtacctgctggtgcccggcaagaaggccgaaaagggctacgtgctcctgcgcgaaacgctgcgcagtaccggcaaggtaggcattgcccgggtggtggtgcgcacgcgcgagtacctgtgtgcggtgatgccgcatgcggacgcgctggtgctgatgatcctgcgctatccgcaggaactggtggatcccgaggactacaagctgcctgccggcaagctgtccgactaccgcatcaccagcaaggaaacggcgatggccgagcagttgatcgagtcgatgtccggcgattgggacccatcgcactaccacgatgaattccgcgagcgcctgcagcaggtgctgaacaagcgcatcaagtccaagggcggcaccacgcgggtggaagatgagcccgcaccacacgaggatgcgacaacgaacgttgtcgacttcatggcattgctgcagaagagcctggatgcgaacaagcgcacgccggcgaagaaggccgcaacgcgcaaggcagccgcaaagtcgacggtgaagaaggccgcaaagacgacaacgaagaaggctgcgaagaaggccgcaccacggcgcaaggcaggttgaaccatgtcgctgcaccagtaccggcgcaagcgccggcttggcggaggcacagggcagacgccggagcctgacgacacacccgcacgcggtgatccgcagcggcggccaaccttcgtcatccagctgcaccatgccagttcgcgccactatgacttccgccttgagatggacggcgtgctgaagagctgggcagtgccgaaaggtccttcgcttcgcgtcggcgagaagcggctggccgtggaagtggaagatcacccgttgtcctacgctggcttcgagggcgacattcccgaaggccactacggcgcggggcacgtggaggtgttcgatcagggcacctgggcctgcgaaggcgatccactgcaggcgctggcagctggaaagatcgacttcgtactgcatggacaacgcctggccggtggctggaagctggtgcgcacggcaatgaagggacgccaggtgcagtggctgctgatcaagcgcgacgacgagcaggcgcgcgatgccgaagcagacgatctgctggacgcgcacgtgcccaagcgcgcatccaccgtgatgaagcgcactggggggaaggcagggcgtgctgtgcccgccgcacgcacggctacccgcaaggccgatgcacgctggcatgcgcgcgcgctgaaactggacggcgcacgtgacacgccctacccgcatgggttcaaaccgcaattgaccgatcatcgcgacagcgcgccggacggcgcgcgttggctgcacgagatcaagtgggacggctatcgcctgctggccgatctacacgacggcgaggtgaagctccgctcccgcaatggcctggattggaccgatgacttccccgaggtcgtgcaggccgtgcaggcgctgccggtgcgcgatgcgcgcctggacggtgagctggtggtgctggacaaggaagggcgcagcgatttcgcagcgttgcagcgcgtgatcgatggaagctcgaagcatccgctgcgctacatcgtgttcgatcttccgggtgtggccaacgcggacatcagtcgtgcgccattgctggaacgcaaagcgctgctgaaggatctcatcggaccggtgcccggcatcctggccttcagcgaacatgtgatcgaccagggcccgcaggtgttcgatgccagtggccaggccggattcgaaggcatcgtcagcaagcaggtggatgccccgtacgtgaatacccgcgcgcgcagctgggtgaaggtgaagcacgaagacaccgacgagttcgtgattgtcggctacacggcccccaggggctcgcgggtgggtttcggatcattgttgctggcaacgccggacaaggagggtctgcgctatgtgggccgcgtcggtaccggcttcgacgacgagaacctgcgcgcgctgctcaaggcattgcagccactggcagtaaagacgcccgtgctgcagcttccggcgcatgtgccgttccgcgccgccagcgtgcgctgggtgaagccggtgacggtggcggaagtggcgttccgtggctggggcaaggaaggcctgctgcgccaggccagtttcaagcggctgcgcagcgacaagcagaaggaggacctgggaatgagcaacgcaacagcagttgctgaagccgggggtgaggtccagatcacgcatccggagcgtgtggtgtttcccagtcagggactgggcaaaggcgacgtggccgactattaccggcgcatggcgcgctggatcctgcccgaaattgccggacggccgctgtcattgctgcgctgccccgatggggtgggcaaggcctgtttcttccagaagcatcatggccccggcctgggcgacgcggtgcacgcggtgcccctgcagcagaagagcggccgcgaggactatgtctatatcgacgacgcacggggcctgctgcagctggtgcagatgaacacgctggagctgcatccgtggggtgcgaccgtagcagacaccgagcatccggatcgactggtattcgatctcgatcctggcaacggcgtcagctgggcacaggtgaaatcgggtgcacgcgatgtgcgtgaccgcctgcagcaggtgggcctggagagcttcgtgcggctgtctggcggcaaggggctgcatgtggtggtaccgctgcagcccaaggctggctgggacgaggcgaaggcgttctgcgaggcctttgcgcaggcaatggcaaaggagcaacctgatcgctatgtggcgacgatgagcaaggccaagcgcagtggcgtcatcttcatcgactggttgcgcaacacccgaggggccaccagcgtgtgctcgtggtcgctgcgcgcgcgcgattccgccggtgtggcagtgccgctgcgctgggaggaactggcgcgtatcagtgctgccgacgcctttcccatgggcaaggcgctggcgagggcgcaacgcctgaagagtgacccatggcagggcatcgcgcagttgaagcagacgctgccgcgcatggacctgtagagccgagcccatgctcggctgcctgtgtcgatgtgcatgaaagccgagcatgggctcggctctacaaaggcggcgttaccctgcgtcgcgcgaggcgcgccggccgaaccaccaaccggccagcagttgcagcggcagcgatgccagcagcgaaatgacgaaccagaacgggaaatccgcaccggccgtccacatcgcgtagccacagcccagcgcgatcagcgaccagatcgagaagccatgcgaacgcggccagcagggggcgtaataggtggcaaaggaaacgcccgcgatgccaccaagaacgctgaaggtgaggtcccagcccagctgcacgctgttgttgtccggcgacaggcccagcaacgggggcagccagctggcgacgctgctgaccagcgcaagcgacaggacgccgccgatcagggcgacgatggacaggaacagggtcttgagcaggccgggcatgcgcgcattgtacggcggccacagagtgcccgcgttgccggccagcggccggcactaccgaaccgcctggggtttgccggccagcggccggcactaccgatgaatcggcatggccgccgcgtccgtgggagagggggacggagcgacgacggccatgcacaggcggtcaggcggcgaagtcgagtaccacgcggccctcaatggtgcccgcgtgcatgcgcgcgaacacgtcgttgatgttctccaggcggtcggtgctgacggtggccgcgaccttgccttcggcggcgaactgcagcgactcctgcaggtccagccgggtgccgacgatcgagccgcgcacggtgatgccgttgagcaccatgccgaagatatccagcgggaaattgccgggcggcaggccgttgagcgagacggtgccgccacggcggaccatgcccagcgcctgctcgaacgccttcggtgagaccgccgtgaccagggcgccgtgcgcgccgccgatctccttcctgaggaaggcggccggatcggtggtgcgcgcgttcacggtgatctgcgcacccagctgccgggccaatgccagcttgttgtcgtccacgtccaccgcagccacgttcaggcccatcgcacgggcgtactgcaccgccatgtggcccaggccaccgatgccggaaatcgccacccagtcgccgggcttggtgtcggtgaccttcaggcccttgtagacggtcacgccggcgcacagcaccggtgcgatctcgacgaagcccacgtccttcggaagcaggccgacatagttggcatcggccagtgcgtactcggcgaagccgccgttgaccgagtaaccggtattgcgctgtgtctcgcacagcgtttcccagccacccaggcagtgttcgcaatggccacacgccgagtacaaccaggggatgccgaccctgtcgccttccttgacgtgccctaccccgcctcccacggccacgacgtgccccacgccctcgtggccggggatgaacggcgggttcggtttcaccggccagtcgccctcggcggcgtgcaggtcggtgtggcagacgccacaggcctcgatcctgaccagtacctcgcccgcccccgggcgtggtaccgagacttcctcgatcaccagtggcttgccgaactcacgcacgacagcggccttcatggtcgaattcatgttcggatctccgtagtgcgcttgcccacagaatgacgccggcacgaggccggcgctttgatcacgatcaaacctttgaagattcgcggagcaggttcagctggccagcacggacgcctcgcgggccaggcgttcgatcgcctcccagtcgcgggtctgcagcagtgccggggtggtcagccacgaaccgccgacgcacagcacgttgggcagatgcaggaactgcggcgcggtctgcgcactgatgccgccggtcgggcagaagcgcacatcggcgaacggaccgtgccaggccgccagcagtgcagcgccgccggcctgcaccgccgggaagaacttgaaggtgtcctggccatgctccaggcccaggatcaggtccgaggcggtggcggcaccgggcaggtatggcaggtcggcatcacgcgcggccgcatacagcgccggcgtggcacccggggacaccgcgaatcgcgcgccggcctgcttcgctgcctgcatctgcgcggcgtcgagtacggtgccggcaccgatcaccgcgtccggcacggcctcgaccatcgccttgatcgcatccagcgcctgcggcgtgcgcagcgtgacctcgattaccggcaggccgccgcggaacagtgcctgggcgacgtcgaccgcttcattcacgtcttcgggggtgtacaccgggatcaccggtgccagcttcaacagcgcgcgcaggcgcggatcagcgctggacatggtcttgctccttgcccgacggggcatcgcggatcgccgccgggtacggcagcgcagcggcgcatgatgccacggggctcacgaacgtgctggcagcgtcgccccgccctgccccggtcaggccgggtcggcctgcagcgcctggatgcggcgctggtaccagtcgccaccgagcgggtcgaacaccgccgagcgctccatctgcgactcgtacacgtgcacagaaatcgccaatgcgtcgtcgctggcgttgcgcagggtgtggtactcgtgcggcgggatcaggctgccggcactgccgcagcctccgcgcagcgtggcgtggcggtggaaacgccagcgctcgccggcgcgctccagcagctcgtaacgggtgatctccagttcgcccaaccacactccctccacacaccacatggcatcgtggtcgtgcagcggcgtgccctgccctgggccccagctcatggcgatcacgctgtagccgtgttcgcggctgtggtacagcggacgtcgcgcgtaatgatcactgaccggccgatgcacgcattcgggcaattcgatgcggctgtcggttatggcttcctgcagcgccagctgcaggtcggcggtgatgcgcccggcatcaccggcggtcaccgccgcgtcgaccgcagcgatcaaccggtcgcggccacggaacggcggaaacggagaggtctgcaggtccatgcacctgactgtagcggagcatggttaagggaatgttggcgttcgcgcgcgtcgcgtccgcattcagggtgaacacgcgcagaagaacggttcagatgcagaggcactagagcaatcacaatggaacctcgcgcagcaaaacgtgtcgaacacgacgcgattcagatccgctgcgacgttccgcaacttcgcatccgacgggtgcaaggctagaattctccgacttacctggttctatacatgtcagtgcgaaatatgagcgatgccgcgttgccggcatcgaaaggcaaggctgccacgatcaacgacatcgcacgactgtcgggagtttccaagaaaacggtttcaagaatcatcaacaactcgccgctggtgcgcaaagacacccgcgacaaggtcgaggcgttgatgcgcgaggtcggttacgtgcccgacccgctggcgcgcggactcgcgttccgccgctccttcctgatcggcctggtgtatgacgaccccggcgcccaatgcattgtcgacctgcagcacggcgcgctggaagcgctgcgcggcaccggctatgagctggtggtgcacccgtgcaacagccaggatccggactgtgcggacggcgtgcgccgtttcgtgcagcagcagaaactgcatggcgtgatcctcggcccgcgcgcctccgaatcgatggcgctggcgcagatgctcgacgcgatcgactgccgccacatccgcatcaacgcgcatgcgtcggaagaagacgtgcaggcggtggtcacccacgatcgcgatggtgcggcggctgctgcgggctacctgctctcgcttggccaccgcgacatcgcggtgattgccggtcccggtgaccggcgcgctgcccgcgagcggacccacggcttccttgatcggctggcccaggtcggcgtgaccctgccgggcgagcgcgtgctggaagcgggcgacaccttcgagtccggcgtgcatgccgccgaacgcctgctgatgggcggacaacgccccagtgcgatcttcaccggcaacgacgaaatcgccgcgggcgtctaccaggtggcattgcgtgcgggcatcgcggtgccgcagcagttgtcgatcgtcagctacgacgacagcccgctggcgtcgcggctgtggccgccgctgacgtcggtacgccgccacgtctccgacatcggccgcatggctgccgcgatgctggtgcagaccgacgtaccggaggcgccggctgcggccagcgtgcatccgcaactgatggtgcgcggttcctgccgggccgtggacggctgagtgtcctgccctcgcctgcgccgtcgcgacagaacggtgcaggcaacaacgaaaacggcgcaccagggtgcgccgtttccactgcgaagcggtgtgcgttacgcgcttacacgtcgccgccgtcggcccagccttcacccgtgcccttctggaacacgcggtcgtcgtcctgcacatcaccggccggcagatgcgcctggtcggccagtgccgcgtagatcggggtgaagtccggcgacgtcgcctgcatcagctgttcgaagctgtcgatgacgaagtaggtcttctggaaggtgtcgatgcggtacttggtgcgcatgatccgctgcaggtcgaaaccgatgcggttgggcgcgggcgactccagcgagtacagcgactcgcccttcgacgacacgatgccggcgccgtagatgcgcaggccgtcgggcgtatcgatcaggccaaactccaccgtgtaccagtacaggcgggtcaggttctgcagtgcatccgggccgatcgcgtgggccttgacgccgccacggccgtacgcctccatgtagtcggcgaacaccgggttcatcagcagcggcacgtggccaaacagatcgtggaacaggtccggttcggcgatgtagtcgatctggtccgggcgacggatccaccaggtcaccgggaaacggcggttggccaggtggtcgaagaaatccagttccggcagcaggccttcaacgccgaccagggtccagccggtggcggcgcccagtacttcgttgagctggtcgaagcgcggaatcatgtgtgcgctcatgcccatctcgtcctgcgcgtccaggaactcctggcaggcgcggccgaccagcagttcgcgctggcgctggtacagcgtgctccaggtggcgtggtcgtcggcgctgtaggtgtcccacggttgctcgacgagcgcggtggtatacaccggcacgtagcccttgtcggtctgctggtgttcgacgcggcggggctgggcgaggtccatggggcactccttgacgggatacccacgatgctagggcagggcgcgcgcaacagggttgcaaaagttgcgtcgattagccttattggcgcaatatccttgcgtactcaccatgttgcggggcaacaatggccggagaagtccagttcgatcgcacggatatacgtctactggctgaaatccagcgggatgggcgcgccaccaacgccgagctggcgacacgggtgaacctctcgccctcggcctgcctgcgccgcctgcagcggctggaaagcgagggcgtgatcgtcggctatggcgcgcggctggaaccgcgccagctgcgcctgggcctgcaggctttcgtgcgcgtgcagctggaaaagcatgaccaggccgccatcggccacttcgtggacagcgtgcaagcgtgggacgaggtggtggcctgccatgcgctgaccggcgacatggactacctgctgcacgtctacgtgcgcgacctggagcacttctcgcacttcctgctggaccggctgctcaacgccggcggcgtggccgatgccaattccagcttcgtgctgcgcacggtgaagggtttccaggcgttgccgttgtcgcagctggagccctgagcagccaccaggcgtgcccggtggcctggcatcaatggatcagcacttgtccttgcggcccatcagcttgcccaggcgcgaggcttcctcgcactttggtgcggccaccggcgcgggtgccgccgcggcggcgcgcgcgcgctgcaactgctggatcttcgcgcggatctgcggcatggccgccattgcggccttctcgccttccaggatcgcggtgccgcgctggctgaaatcggcggcgccgatgtccagtaccttcggacggatgacgatgtcggcgcgcgccagctcctgctcgcccaggcgctggcccatgatcgagatggactggttgacgatgcccagcatgtccgtcggtgccttgccgctggccttgctggagatgtccacggcgatcacgaagtcggcgccgagctggcgcgcggcatccaccggcaccgggctgaccacgccgccgtcgatatagttgcggccgccgatcttcaccggctcgaacacaccggggatgctgctcgacgcgcgcaccgcctggccgacgttgccgcgcacgaagatcgcgcgctcgcccgtttccagctgggtggcaacggcggcgaacggtttcttcaggcgctcggcgggacggttggcgacctgctcgttgacgtagtcctgcagcttctggccctgcaccaggccaccggagaacaggcgtacgtcgcggatgctggcttcgtccagcgcgactgccttgctctgcatctggaaggcgtccatgccgctggcatacagcgcaccgaccacgctgccggcgctggtgccggagaccacggccggctcgaagccgttggcttccagcatcttgatcacgccgatgtgcgcgaagcccttggccgcgccgccaccgagggcgatgccgatcctgatcggcttggcctgcggcaccacggtcggcgccggtggcggcgtggggcggaccgggtcgccaccgcagccggccagcaggccgatcagggcgacggacagcagcatgcgggggcggaacaggctcatcggcagtgcgctcgcggcgccggattcaggaaagggcgccagcataccgaagccgtggcggggcgggcagggtggggggagctccctattcagcaaaaaaaacgtgaatcgcttctggtgggtgcggaccttggtccgcacaaatgcctggtcgcgcgctgaaggaatgtgccaaccagggttggcacctaccaaatgagtgggtcagaaccggttgtcgccatccagcatccggcccaggccgcccagcaccgagccttcgccgcggctctggccgccgccctgcggtgcggccatccacatgcggccggccaggcgcgagaacggcagcgactgaagccagaccttgccggggccggtcagcgtggccaggaacacgccttcgccgccgaacagcatgctcttgatgccggccacccggcgcacgtccatgtccacgctggagtggtaggccaccacgcagccggtatccacgtccaggcgctcgcccgcggccagctcgcgctcgatcacgcagccaccggcgtggatgaacacccagccgtcgccttccagcttctgcatgatgaagccctcgccgccgaacaggccggtcatgatcctgcgctggaactgcacgccgatctgcacgccgcgcgcgccggccaggaagctgtccttctggcagatcaggcggccgccgtgctggtccagtttcatcgccagcaccgtgccggggtagggcgcggcgaaggcgaccttgcccttgccatgcccgctctgggtgtagacggtggcgaacaggctctcgccggtcagcacacggcggccggcggccatcatcttgcccatgaagccgccctggtcaccgttggcagcgccaaacaccgtgtccatctgcaccgtggcgtccttgaacatcaaggcgccggcctcggcaatggcgctctcgccggggtcgagctcgagctccacgaactgcatttcatggccgacgatgcggaactcgatgtcgtcggcgcggccgctggcgccggcggcgaccgggaccggcggcggtgtgttgggcatgcccggggccggagcctgcagctcggccacctcggcgatcggcgtccacccgctcatgccctggcaccatgccagggcgcgtggattggcctgcgcgtagcggcgtgcggccccgtcatcaagcgggccgatgcgctcggcctgggcggaggcatggaagtaccactgggtcatggcggcgggtccgtcgcgtggaaaccccgagtctagcgagcgcccgggggtgccggcgacggggccatgaacggcgggcatttgcggcgtaggtgctgtattgcaacaattatctggtagcgccgttttaccaccccctccaaacacagcctaccgccatgtccccgacccgcacttcccgtggccgatttccggtcgcgcgccccctcgttgccgctctttccgccctgctgccgctggtagcagccgcccaggaaacccccgctgccaaggatccggttgccctcgacgccctgcaggtgaccgcgcagcgccgtgtcgagaacgccaaggacgtgccggtcgcgctctccgcgatccagggcgagaagctggatgtgctcggttcggccggcgatgacatccgtttcctggccgcacgcgtgcccagcctcaacatcgagtcgtcctacggccgtgccttcccgcgcttctacatccgcggcctgggcaacaccgatttcgacctcaatgcgtcgcagccggtgtcgctggtgtatgacgacgtggtgcaggaaagcccgctgctgaagggcttcccgctgttcgacctggccaacgtggaagtgctgcgtggcccgcagggcacgctgttcggccgcaacaccccggccggcgtggtcaagttcgattcggcgcgaccgtcgcaggatgccgacggctacgtgcgcgtgggctacggcagctacaacagctggaacgtgcagggcgcctacggcggcccgctgaccgatcgctggtcggcacgcgtctcggcgatctaccagcgccgcgatgactgggtcgacaacacccgcgtcggcgctcccaacagtggcttcgaaggctatgacgaagccgccggccgcgtgcagttcctgtacgaaggcgatgacttcgaagcgctgttcaacctgcacaagcgcaagctcaatggcaccgcccgcctgttccgcgccaacatcatcgagaagggtggcaactcgctggtcgagaacttcgaccgcgacaaggtggccaacgacggcgtcaacttctccgacctgaagacctggggtggcagcgcgcgcctgcagtggaacctcggctcggtgacgctgcactcgatcaccggctacgaaaccgccgaatcgctcaaccgcggtgacatcgacggtggctacggcgcggcgttccttggcgccggcaactacggccccggcctgattccattctcgtcggagtcggccgacggcctgccgcatcaccgccagtggacgcaggaagtccgcatcgagtccaacgagtggggccgcttcgactggcaggccggcgtcttctacttcgatgaagacgtgaccatcaacaacttcaactacgactcgctggccccgggcaatccgcagaccggccacgtggtgcagaaccagcgcaacaaggcctgggcggtgttcgcctcgggtgacttcgatgtcaccgaccgcttcaagctgcgtgccggcgtgcgctacacccaggacaagaaggacttcagcgccagcgtgctgcaggccgttccgttcggcaccccggtcagtggcccgtacctggccaacaccgacgtcaacgacgtcagctgggatgtcagcggcgtctacaagctgaccgacgacatcaacgcctatgcccgcgtggccaagggcttccgcgcgccgtcgatccagggccgcctggccttcgcgccaggcctgtcgcaggccgattcggagaaggtgatctcgtacgaggccggcatcaaggccgacctgttcgagcgccgcgcgcgcctgggcctgagcgtgttccgctacaacgtcgatggccagcagctgatcgcggtgggcggcagcaacaacaccgccaccctgctcaacgccgacaagaccatcggccagggcgtcgagctggacctggaggcctacctggccgacaacgtcctgctgaccttcggcagcagctacaacgacaccgagatcaaggacaagaacctggcggtggcgatctgcggcggtggctgcaccatcaccgacccgaccacggtgatcaacggccagacctatgcgctggtgaacggcaacccgctgccgcaggcgccgaagtggatccacaacgcgaccctgcgcgtgggcttcccgctcagcgatggcagcgagctgtacgcctacaccgactgggcctaccgcagtgcggtgaacttcttcatctacgagtcgccggaattccgcggccgcagttcgctggaaggcggcctgcgcctgggctacaactgggattacggccagtacgacgtggcggtgttcggtcgcaacctgaccaaccagacccgcgtggtcggcgcgatcgacttcaacaacctgaccggcttcctcaacgagccgcgtacctggggcgtggagttcaccgcgaagttctgatgcggtggctgcgttgatgcaatgcagaagggccggcgcaatgccggcccttctggtttcctgcttcgtgtagagccgagcctgcgctcggctgctctgagccgagcatggctcggctctacagaggcgtggcctacagcgcgctctgcgggcgcaccttcagcaccgcattctcggtggcgcagtcgcggctggagtgccgaccggccttgcgcgccgcctcgatctccttgcgtgcggccagcaggtccttgttgaaggcagcgttgtcatgcaggcgggccacggcggccgcgcccatgaagcggccttcgaggatgtcgctctgccagtgcacgttgcacaccaggcggctctcgccgtagttgcggccgcgggcctggatggcatcggcgcggtccggcgcgatctccgacaggatcagggcccaggcccagccgatcgaggtgtggccggacggataggaaccgttcttgcgcaggccgtcctcgtccttcggcgagcaggtcggctcaccgttgaccatgaacgggcgcgggcgctggtagtggttcttggccgccttggtggcggcgctggcgtcgatccggctgcgctccagcagtcggtacagcgccggggtcttcactgcatcgacgtcgatgtcggcggcgcaggagaagtggttggcgccttcggggaagccgagttccgcatcgacgccggcctgggcgaagcgcgggctgccacgcagcgcgcgggcttcacggctgacctgttcgtccagggcgagggcggccgaaccggccgccggtggtgccggcaccaggtccaggctggccggaaccgcgctcgtgtccagatagcccaccgccttggtggtgatgttggcttcgacggcggtcggcttgctggcggtggctgcgcagccagccaggaccgcgacaacggtgagaccgagcagtgggcggggggtgtgggaaatcagcgacatggacggctccagaggaaaaacatcgcgtcatgatcgcagcccgtatgcgacaccgcagtggccatcggtcatacggccagacccggcatggtcatcggggcagtatgaaaaacgtcatcgagtgtcgtcagtctcctgaatccgggcgcagcgcacggactttcacgcgcctgcgccgcgagcatcgacacaacggggtcgagaggccgtccagttccagccgggtcggggggatccactgacagagggagagaagcgatgcgcagcaccgcaacaggaagtaccgccctggccctgctcctcgggctggcaaccgccccggcgcaggccgccgacgtggtcggcgtggccttcgtgcatggcaccggcgcgcagaccaatgccacccaggactactggcagccggcgatcatcgacaccgtgcgccagggcctgccgaacagcagcaactacgtcgtcatcaactgtgacttcacccagtacatgtggaaaccggaagcggccggttgcctggccaaccagctgaccggcttcatcgacagccgtggcatcacccagctggtggtgatcacccactccaacggcggcaatgtgatgcgctggatcctgtccaacccgacctacgacagccgctatccgaagatcatccgcacggtgcgcaaggtcaatgcactggctccgtcctcggcgggcacgccgctggccgatgcggtgctcaacggcaataccttcgaaacgtcgctgggctggctgctgggctacaagaacgacgcggtacgccagcagcaggtggcgagcatggccacctacaacgcgcagaacctgtacggcacggccggtcgcccggcgctgcccaaaccgttccgtgcggtggtcggcagcgatgtggaatcggcggtgtgggacagcaacagttactgcggtggctacgccgccaatgtcggcctggagttcacccagaactggctgtcgtcctgctccgatggcttcctggagtgcagcagccagaaggctgccggcaccacctggttcaccgacaaggcacgcacccagggcgccgaaccactcagccacaaccagagccggcgcgagtgcttcggcctcggcaccctgctgcgcaacgacctgaaccagtgagggagatgaccatgacgaaccattccaccctgctggccagtgctttgctggccgtgctgtccctttccgcagcgcaggccgcgcagccgctgcaggccgcccgcgcgggcgatcaggtgcctgccgcactggtggccgcgccgctgcccgccgatgaaagcgagcacgcgccgctgtcctttgcctgggcgctggacccggcacaaccgctgcaggcggccacgccgtatgcctcggtcagccgcagctactggcagcaggtcgatggcacgcagctgcaacgcggcctggacctgccgctgacggcgcccgatgcggtgatccagctgagcccggccgcaggtgcccgcgcgctgccggccaacaccctgcaggtgcgcgacccggccggccgcagcagcgtggcccgccgtgtcgatgcgcgcgcgctgcaggatgccggcatgccggtgagtgatggcagcagcatgctgcgcaccggcgcgaccagttcggccggtgcgtacacgctgcagagcacgcaggcgcagggccgctatgtggtgcaggtgcttgagccgaacagcccgctgcggctggaagtgcaggccaaccaggcgcaggtgctggctggtggcaacgtgcagctgcaggcacgcctgctggaagacagcgccaccaccgcgcagctggcatcgcgccgtggcggcctgggcggtgaagccctgctggtcgcaccggatggccgcagctggccgcagcgcctgctgcgcaccaccgacggcagcctgcgcgcgcaggtgcgcatccccgccgatctcggcagcgtgcaggggctgtgggaactgcaggtgttcgcccaggccgatggcgtgctgcgcgacggcaaggtggctttcgcggtggcacggccgaccgcgcgcttcagtggccaggcggcaccggacccgtccagccgccaggtggcactgccgctgcaggtggccgccgctggccgctacgaagcacgcggcacgctgtacgccacggcccgcgatggccagttgaagccggtcgcgcaggcacatgcggcggcgtggttcgatggccccggtgcaggccagctggtgctgccgttcgaccaggccgcattgccggccggtttcggtgcgccgtacgaactgcgcgacctgcagctgcaggaccagagccggatggcaccgatcgagtcgcgcgcgctggcgttgcggttctgagcacggcggtggcgggccgggatatccggcccgctgcattgcatcctgtagagccgagccgatgcccggctactgtttgtcgtgatcaggagcagccgagcatcggctcggctctacagtggcatgtcgatcaccccgcgtacgcggtcagccggccttcctgctcgcatacggtgatcgcgccgccgaacaccgccgacagcggttcgttgcgcagcagctcggcgcgggtgccgtcggccagtacgcgaccatcgcgcagcagcaccacgcgctcgatctcgggaatgatctcttcgatgtggtgggtcaccagcaccagggtgatgccctgctgcgccagcacccgcatggtcgccaccagctgctcgcgggcgaccaggtccagcccggtggagggttcgtccagcagcagtgcctgcggtcgattgaccagcgcgcgggcgatcagcacgcggcgggtctcgccggccgacagctcggcataggcgcgctcgcgcagcgtcagggcgccggtcatcgccagcgtttcaccgacgcgtgcacgcatgtcggcggtcacctcgcggaaggccggcaccacgtagctggcgaagaagccggacagcaccgcctgttccacggtcaggccgggcatgtcggccaggttgctgctgaggtcgccggtgacgatgcccagctgcgagcgcagccggtccacctgccagcggttctggcccagcaccttcaccgccaccgtgccgtcgccctgcgccagtggatacagttcgcgggtgatcagcttgatgaaggtggatttgccgcagccgttggggccgagcagggcggtgtgctggccctgcgcgatgcgcaggctgagcccgtgcagcaccttcacctggccgcgcaccacggtggcgcggtccagttcgatcaaggggggcagctccgcgacgggcggggcggcggtcatggcgctggcgcgtggatcaaggctcgacaactcaggtccccaactgtgaacggtgccacggatggcgatgcgatacatcgccgcagggatgcagtttgcaacgcaagcggccatcatgtctgccatccccgcgtcgatccggagagccgtcatgcctgatgccctgatgtccctgttgaccggtggtgtgctcggcctggggtggtgggccatgctggcagtgctgctggtcttcacccagatcaccatcttctcggtgaccctgtacctgcaccgcagccaggcccatcgcggggtcgatttccacccggcgctggcccacgtgttccgtttctggctgtggctgaccacctcgatgatcacccgcgagtgggtggccatccatcgcaagcaccacgccaaggtggagaccgaggacgacccgcacagcccggtcacccgcggcatcggcagggtgttctggcacggcgtggagctgtaccgggaggcacgcggcatgcgcgcggacatcgaacagtacgggcgcggtaccccggacgatgcgatcgagcgccacctgtataccccgcacgccacgctgggcccggtgctgctgctggtgatcaacagcgtgctgttcggcctgcccggcgtggccctgtgggcgatccagatggcatggatcccgttctgggcggccggcgtggtcaacggcctgggccactggtggggctaccgcaactacgagtctgccgatacctccaccaatctcacgccgtgggggttctggatcggtggcgaggagctgcacaacaaccaccatgccttccccagctcggcgcgcttcgcgatgcggcgctgggaattcgacatcggctggagtgcgatccgcctgctgcaggcgctgcgcctggccaaggtgctgcgggtggcaccggccatggacgtgcgtccgaacatcgccgtgcccgatgccgagacccttaaggcgctgctgtcgcaccgcttccaggcgatgaccgactaccagcgcaatgtgttcatgccggccctgcgcgaggaagccgcccaggccggagccaagctgcgccgcctgctgccgcgccggctgcgccgtggactggtcaacgatggtcgctggctgaagccggacagccgtgcccagctcagcgcatgggtggcacagcgcccgcgcatccgcaccctggtcgagtaccgcgcgcggctggcggcgttgctggaagcccgaggccacgatgccgccgagcgcctgcaccagttgcaggcgtggtgccgcgaggccgaggaaagcggtatcgcggcgttgcaggcctacgccgcacgcttgaagggctacagcctggtgggcgcgtgagggcagggtacgggcttctgctggcggcactgctgccgggcgcggcgctggcccaggtcaccgacaccgccagctatctgcagcggatggacagcgatggcgacggcagggtcagcgaggccgagtacgtgcagtggatgctgtatgccttcgaccgcatggaccgcaacggtgatggtgtgctgacggccgaggagctgcccggtggcaagggcagggcgatcagccgcgagcagcagcggcaggtgatcgtgcagcgcttccacaagcaggatgccaacggtgatggtttcctggatgcgcgcgaactggcggcgcctccgcgctaaagattcccggcgtgctgccgatggtgggttcgacgcgatcccgggtaccggtcgatccgcacgggtaaggcgatctggcatgtcgaccgcgatggatcgcggtagggggaaggacatggaagggagtgcggtgccattgcgatgatcgatgccgaacggaatcgcctgcactggcccgacacgacccaaggatcccccatgaaatcgaacccacccctgctggcggccgcgctgctcggcagcctcgtcatcgcctcgcctgtgctggccaatgagccacccccgaccgccccgtccgacacggcgacggctgcagacgttcccgccgctgatgccggcgttgtcgccgccgtggcggagctgcctgcctgggaaagccgggtgccggtgagcgtaaagctgcagatgggcgcggatggccagccagtcggcgacaagacgctgcgcctggtgcagcgttccaccaccggcaagctggtggccgcgcaggttgccgtgtcattgttttccggcacgctcggcggcagctcgttcaagaaggaccagctgaagggaacccgggtggagaccgttccgaacccggccttcggttacctgcaggaccaggtgcgcatgcgcctggccgagtacttcaccgcgcatccgggcgctgtgccggcagaggtacggccggtgcagatcaccgccgatggcttcaccctgatctacaaggaactgggcgatgccgatacccagtacgagctgcgccagacccagcacgtcggcttcccgtatacccgcaagctgttgcgcctggtcggtggcgaaggcgtgcagtgccaggtcgacgcaccggtggccgcacccctggaagcctggcaggccgacgactatgcgttggtcaagcagacggccgagcgctacagcgaccagtgcctggcccggttcgtggaaacgctgccgtcgctgttcccggaccgttccgccgctgcggcaccggttccggcggagcctgtgcgcgccggccagggcgcctgacaccggtcgatgccggggatcattccccggcatcgacggccaggtgccggccgcagagcggggatagaatccctgcatgcctgaactgcccgaagtcgaaaccacccgccgcggcctggcgccgcacctgcagggccgccgcgtgcatggcgtgatcctgcgccgcgccgacctgcgctggccgattccaccggaagtggccgagctgctgccggggcagcgcatcgaggacatccgccggcgcgccaagtacctgctgctggataccgcgatcggcagcgcggtgctgcacctgggcatgtccggcagcctgcgcgtgctgcccggtgacacaccgctgcgcgcccacgaccatgtggatatcagtctggacaacggccgcctgctgcgcttcaacgacccgcgccgattcggcagcctgctctggcagcccgccggtgagatccacccgctgctgcaggggctgggcccggagccactggacgagggattcgacggcgactacctgtttgcgcgcagccgtggccgcagtgcgccggtgaagaccttcctgatggaccaggcggtggtggtgggcgtgggcaacatctacgccgccgagagcctgttcaaggccggcatcagtccgctgcgcgaggctgggaagatctcgcgcgaacgctaccagcggctggccgacgcggtgaaggagatcctgggctatgccatcacccgtggcggcaccaccctgcgcgatttcatcagccccgatggcgcgccgggctacttcgaacaggaactgctggtgtacggccgtgacgggctgccctgcccgaactgtggccgcgcgctgaagcacgccaccatcggccagcgcgccagcgtctggtgcagccactgccagcgctgagccggcagccagcggcagctgaacgggcagggcgcgtctccgctgcccgttaacgtttgtctgcctatgatggccgaccttcctccctgtgcctgacgcgcctgcatgcaacgacgcgacttcatccgcaatgcctccctcgccctggctgcattcggcctgccgtccctgcccgcgtgcgcggccagcaggagcggccagatgggcctgcgccgcctcggccagccgcaaccgttcgacttcgccaccctgaagggccaggcgcgcgcgctggcgcaggcgccctacaagagccacaagcgggtgctgccgggccgtctggaaggactggactgggaccagtaccagtcgatcggctaccgccaggaccatgcgctgtgggccgaccagcccggcaagttccaggccaagttcttccacctgggcctgtacttccattcaccggtgcgcatgttcgacgtggtcgacggcaaggcgcaggagctggcctatgacggcgcggcgttcaactacggcaagagcggcatcaaggatggcgagctgccggccgacctcggcttcgccggcttccgcctgaacacccgcaaggacactgaccgcgacttcgccgccttcctcggcgccagctacttccgcgcggtcggcaaggaaggccagtacggccagtccgcgcgcggcctggcgatcgacaccgggatgggcaagccggaggaattcccggatttcatcgcctactacctggaacagccatcggctgattcggacacgatcgtggtctacggcctgctggattcacccagcgtggctggcgcctatcgcttcgcgatcaccaatggcgacgtgctgctgatggacatcgacagcgcgctgtacccgcgcaagccgatcgagcggctcggcatcgcaccgtgcaccagcatgtaccaggtgggcgagaacgaccgccgcatggcatgggactggcgcccggagatccacgataccgatggcctgtcgctgtggaccggcgctggcgaatggatctggcggccgctgctgaacccgcgcaacctgcgcttcaacatgttcgtggaccgcaacccgcgcggcttcggcctgctgcagcgcgaccgcaatttcgaccattaccaggacgacggcgtgttctacgagaagcgcccgtgcctgtgggtggagccgaagggcgaatggggcgagggctcggtgcagctggtggagattcccaccgtggacgagacgttcgacaacatcgtggcgttctggaacccgaaggaaaagccgcagccgggccaggagctgctggtcggctaccgcctgtactggggcgccgaaccgccggcgcgcccgccgctggcgcactgcgtggccagccgcaccggcctgggcggtgtggtcggcaagaagcgcgagtacttcagctggcgcttcgcggtggacttcgaagggggcgagctggccagcctgatcgacaagggtgaggtcgaggcggtggtggaagccagccgtggccgggtcgagatcgtgtcggcgcgcccgctgcgcgagatcaacggctatcgcgcgatgttcgacctggtgccgccggaaggcagtaccgagcagatcgacatccgcctgttcctgcgcagtggcggcaagacgcttacggaaacctggctgtaccagtacaccccgccgccggcgggtgcgccggagcgcacgctgtactaagagagggttgggtttgcagggcttgcagccctgcacctgcagaggccagagcaacagcaacagccgaagcagaagctggtttcctgagggtaggcggggtgggtccggcggcgggagacgccgtaaacccttccctgggggcttggtcgcggcatccatgccgcgaacacccccgccaccggacccaccccgccttcgacagacctccgcgatctgtcggaattgctcatggggtcagatccgttttacgaaggaaaacggatctgaccccggaatttcattcgatatctgacagatgtgtcgaccaaggtcgacacctaccaacagccgcggccaactgtcagaggtggggcggtgtcggagtgcggggtgtcagccgcatggatgcggctgccaagcttacagggacgtacttgcagcgtccccgcagtccgacaccgccccgccatcacacgcaatgccagctcttgctgttgctgttgccggccagcggccggcactaccgcgggtgcagggctgcaagccctgcaaaagaacaccccttacagcggcaggggcgcctgcgccggatcgatccgcccttcaccgcgggtgatcttcttgaactcggcacggctgaccgacacgtagcggtcgttgccaccgatctccacctgcgggccatccttcaccgcatggccatgttcgtccacgcgtaccgtcatcgttgccttcttgccgctgtggcagatggtcttgatttcctgcatctcgtcggcccaggccagcaggtactggctgccctcgaacagctcgccgcggaagtcggtacgcaacccgtagcacagcaccggaatgcgcagctggtcgaccacttcgctgagctgccagacctgggcgcgggtcaggaactgcgcctcgtccaccagcacgcagcccatcgggccgttggccgccagatcctgctccacccagcgctgcaggtcggtatcgcggtcgaaggccatgccatcggcgcgcaggccgatccgcgaggcgaccacgccggcgccggcgcggtcgtccaggcgcggggtcaggatcgccacccgcatgccgcgctcgcggtagttgtgtgcgctctgcagcagggtagtggtcttgccggcgttcatcgccgagtagtagaagtagagcttggccatcggccaattctagtcgccacccggcccgccgtcgcggatctgctgcggtgcaccgatctcgatgctgggcgcaagcgctggccgccagtagttgtcctgcaggcaccagtagtcggcggccttccagtagtcgttgtcgtagacgatgttgcctggtgttgcgatgccctgctcgtcgccgcggcgctgcacgacgaccagggccgagctcacgtagccgacgcggctgccggtgatctgccggcgcccgtcgctgagcgcccgttccatgcggggcttggctacgcggtcgccatagtcggcgtatacctgttggccgcgctcgatcgcctgtgcctgctgcagcggatcaaggcgtgcccagtagtgttcccgcaggaccaggaagtcgtggtacatgcgctcggcggccaggtccatccagatgtaggccatcaccgggtccggcgcagtgccgataccctcctggtacagccttgccaccattgcctgggagaacttgtcggcgtagcgtgccgagcgtttgtagtagaccagggccctggcgggctgtttatcctgttcggcccgttgggccatgcttcgccagaagaggtccgggtgcgaatcgaaaaaccctccggtcaggacggtgggcggaatccgtcgcggggcctcaaccggacattcctttgcggcgacggcagcggccgtcgacagaagcagcaacaggcagagtggagcgtgtttcgccttcatgatcgccctcctggccatggccatggaaaaaaccaacgtcatcgccccgacttcgccaacgcctcgtcctgccattgccggtaggccaccggatcccagtaacgggccagctggtgcttctccggttgcagcacgcgcggcccggcatcgccgcggccctggctgcgcatggcgccgctccagccggcgcggctgccggtctgctgcatgctgccggcgcgcagctcgcgttccagccgcggtgtggcggcggggtcaccgaactcggcgtacagcgcgcggccctcgcgcaccgcacgctcgcgttcgtcggcggacagcgcctcccagaagcgttcacgctgcaccaccagccactcggtgccgcgctcggccgccaggtccatccacgcgtagcccagggcgcggtcagccgggccgccttgcccgttccagagcatgtcggccagcgctgcctgtgacagcttgtcgccgtagcgcgcggcattgcggaagtcgatgcgggcttcttcgtggcggccccgttcgcgggcctgcatgccgagcccacggaagcgcaggtccggatggtagacgaggaactcgtgcgactgcagcacgatcgcttcataggcatccgtgcgcggcggcgggccggacccggccgcaggcagggccagcaggccgagcagggcggccgcaagcggacgggcgatgacagtcggggacatggaccacgctcctgtgttccggtgccgattcaataccttacgggcgggcgccatgcaagtcaggtgggcctgccggcaccccgctacaatcctgtccccatgcacggtctgaatcctccccaagctgccgcggtcctgcacgtcgaaggcccgttgctggtgctcgccggcgccggcagcggcaagacgcgcgtgatcgtggagaagattgcccacctgatcggctgtggccgctacccggcccgccgcatcgctgcgatcaccttcaccaacaagtcggccaaggaaatgcgcgagcgcgtggccaagcgcctgcgcgagcaggacgccgacgaggtgaccatctgtaccttccatgcgctgggcctgaagttcctgcagatcgaacatgccgccgtgggcctgaagcgcggtttctcgatcttcgatgccgatgatgccgccgcgcagatcaaggacctgatgtacggcgccaagcccgatgacatcgaggacatgaagaacctggtgtcgcgcgcgaagaacgctggcctgtcgcccgaacaggcgatggccgccgcgcgcagcaaccgcgagaaggaagcggccagcgtctacgagcgctaccagctgcggctgaccgcgttcaatgcggtcgacttcgacgacctgatccgcctgccggtgcagatcctggaagagaacccggagatcgcgctggcctggcgcgagcgcatcggctacctgctggtggacgaatgccaggacaccaacgacgcgcagtaccgcctgctcaagcagctggccggtgagaagggcaacttcacctgcgtcggcgacgatgaccagtcgatctacgcctggcgcggcgccaatcccgaaaacctgcagcagatggggcgcgattaccccacgctggaaatcatcaagctggagcagaactaccgctgctccaaccgcgtgctgcgcgccgccaacgcgctgatcgccaacaatccgcatgagcacctgaagaagctgtggagcgaccaggccgacggcgaacgcatccgcgtgtgggaatgccgcaacagcgaacatgaagcggagaaggtcgccgccgagatcgccttcgtggcgcaatcgcgcaacgtgccgtggagtgacttctgcatcctgttccgcggcaacttccagtcgcgcccgctggaaaaggcgatgcagctactgcgcattccctatcacctgaccggcggcaccatgttcctggagcgccaggaagtgaaggacacgctggcctggctgcgcctgctggtgaacccggacgacgacaccgcgttcatgcgtgcggtgcagtcacccaagcgcgatgtcggtgccggcacgctggccaggctggccgaactggcgcaggaaaaagacatgccgatggcgcatgtggccgaaaccatcggtgccctgcagcagctcccaccgcgcgcggccaacagcctggcgcgcttcaccgacatcctgcgcgacctgcgtgcacagatgcgccaggtgacgtccggcgacatgatccgcaaggtggccaaggaatccgggttgctgagcgagctgcgccagcaggccaaggaagaggccagctaccagcgccgcgcaaacaacatcgaggaactggcgcagtggttcgagggcggcccgcgcggtgcaaccgccgccgacctggccggccagctggcgctgctgtcgcgcagcgacaaggacgagggcggcaaccaggtgcgcatgatgaccctgcacgcttccaagggcctggaattcccgtacgtgttcatcgtcggctgcgaggacggcgtgctgccgcaccaggtcagcctggacgagggcaacctgcaggaagaacggcgcctgctgtacgtgggcattacccgcgccaagatccagctgtggatgagctacagcaagctgacgcgcaagttcggcgaacatgtgcggttgaagccaagccggttcttcgaggagattccggccgaggaaatccagcgcgacggtgccgacccggtggccgatgcggcgcggaagaaggagcgggcgagtgccgggttggcggcgatcgaggcgttgttcgactaagtggggtctgaacactcctcgttgagcgcagcattccctctttagagtcgagccacgctcgactattgcgtgccacatcgcgccccatcgggcacccaccggcaagtatccaccgcacccgatccatcaaaacaggctccggcacgccagcaagcacctgttccaggtagtccaatggatgcatctgtcgttgcagcagcgcccgtaactgcagaacgtcgggcgctcgctgtttcgcatccagtgaaacccgcagcagcaaatgctgcgagcgcctatccaaccacagcactggaacgtctctgcagtgaatccggaaagcgccgtctgcatgtcgttcgacgagctggaatccctgcctcggctgtgccttcacgaactggaccgcttggcgacgcagctgcgaatagcgcacgccagagaggctctggaacgcgagaggtgagggtatgggcggtaccgaccactggcgcggtaccgcaatcactggggcgaggcacagcgccatcgccacccaagggtgccgcaccactcagccctccggctgcaggcgcgtgctggcgtgcgcggtgagtcccagcccggccatgatcagaccttccatgacccgcgggccgacgtactgctccagttcgccgttctcgcgggcgcgctgagcggccagcaggatctccagcaccacgcgcaggcccgccaacgaacagtcggtgtcggccagggccaatcgtcggccgggcatctgatgccgttccggccagggttggccatcggaagcagcgccggagccgatgctgtgcagcagggcaatgagggtgctcggatccagcgccggcccgttcgcgggcacgtcgtggattgggtgcggggcaggggagtggggctgggtcatggctgggctccttgcgtgcaggcagaagccgccaccgataaaggtggcggacgatgcatggttcgaaaccccgtgtgtggatgaccgggcaggctctaggcctccacgcatcgcccgccatagccggccgacggattgccagccggcaccgcacgaggcggtgccggctggcaacgtgcaaacaacatccacacaaccggggtttcgaatcccgaccaccagtgctcggtggcacggcaaggaatacgcggacctatgcgtgatgccaatgcagtagggccgatgccgtcatcactttcaacattttcagaatcgttgcatatggtgtaacggggccggagcccagcgctgcaaggctatcggcgatgttggttgtggatgccagcggactgtcgacatccgcccggcggggtcataaacgaggcggatgcgacaggggcgcctgagactgtttggtctcagcacctcttcagcgcggctttgatcagctccagccatacggcatgtcaggatgtagggatcgtcgcccaatggcgagctgaccgcctgctcgagcagggtcctggcttcgtctgcctggccggcatccagcagcgtcatgcccaagcgaacgcggttctgcacggtgggcgtgcgcgcaagttcggcgcgagcgttgcgaaggtcctgacccggctcaatcaactgcttggcagagcgaatggcctggcgggcgccgcgcgagttgcgggcttccgggaagtagatcgcgaggaagtagacgacactgccgagcagcggaaacgagaagagcaggatgagtcagtagaggctctggcccgagcgaatggcgcgcaccgcgaagtagatggctgccagtacgtggagtccgattccgatatagggcatgtgtgccgcctcgtccgtgtgggggttggcacaatagtgggtgtggggtcgggtgccatcgggggcgacctggcatgacgcgtcagttaatgagctcaaatcctatggagagctatctgatggggtggtgttgatgaaaagggtttcactccgatatggctggcgattgtagaagagcctcaacctcccgatcttgccgcatcacccggatgagcaggcaaaagacgcctggtgtcgtttttggcgcatcggtttgcggaagtgcagcaggaaatttgatgaatcgtgaattcctcacgagatcgcctcggaataggttgagaggatgtttcacttctggctgcggccaatccgtaggagattgccgtagctcctgatcggaaaattagtgggtcattacagctccgctcaataggggtttgacaacgcgaagctataggcgtagttctttgctcaaacagcagctgattttcctttcactccttatccaaggatgtagcgaagatgatttctgccaaggacaggcgggagggaaaatcccccgtagtaattatcttaattcgcgactttgctcgatcatcacgggcgcagcgcttacgttgggggctgggttccacgcttcggcgcaagatgggctcttcaattaccaagaatatgagaagcggataaagagcgcgcagtcgctcgccgctacctctaccgatgaggtgtttggcgatcggaccgcaggcttcgacggtagtacggagttcttcattgaggacgtgtccattcccggcaattttgaccttcctgtgagcgtcgctcgacgcttttcggtggaggcgactaaccgaggatttcgcgatagcgagaccaagggtctgacactgttcgatgattgggaaatcgtcgtgccttatatgtcgggcgtgtggaccaaaggcgctggatggatcacgggtgaccaaggggctcagaccacgcagcgttgttcggtcaacaccgcgcccttgctgctggagacctggggctacaccgacatcggctttggcatcgatgtgaagtggaatggcggaaccggcgaggaacttctgattgccgatgacccgtcctatgcctctgcgccaggccttgaggtacccaagtggatgacagcgtccagagcgcgattcacttgtctgtctgcaacgcgcaacggatacccaggcgaggcgttcgtggggcatacgcccgatggcaagaagtacttctttgactggggagcggaaaagccctacgccacagccaaggccgggagtcgcatgatggcgcgtaagcgcgtctaccttctggcatcgcgtgttgaggatcgttatgggaactgggtgtcttatagttacgacgggtaccggctcaccaggattgagtccagcgatggacgccggattgacctgagctacgatggcgacggccgggtgaccacagtcacggccaatgggcgagtttggcggtatgcctatgtgggcgatacggagggaaatgacggcggcttgtcccaagtgacactcccggatggctctgcttggacctacggtcatcgcgggcggcttcaatcaagccttcctttgcgtggcggtgacgatgggggcgggtgcgagatccgcgcgggcaatgcccctccacccacgcagatgacggtaacctctccgtcaggtgctcaaggcatcttcgactttgaaatggagctgtttatccgctctgatccttgcaacggactccttccgtcgcattacgatgcatggtccttgaagaagcgcagcatcatggggcccggactgccttcgatggtgagtacgcgaggctacaacctgcagttgccgggaggtgggcgctggtccagcctgaccaagccggatggcacgcagattcgcgaacgctatggcgcagatccgggcttgaacgaacgaaagctcctccaaaagcagattctggatgcggccggccaggtgcaacgtgatgagctaagcacctacacctttggttccgagacaggtccgtttgccgtccgggtaggacggtcaattggacttcagtcaggccagttcttggcgggcacgctgagtgcgctgagcgagagccaattcagtcaggatggcgatacctatcgcgtggtctacagcgacttcaatcgcaatgcccgtccggcacgcgtgacttacactggcccctccggatccaaggccgagatacgagagcatcttgatacgcccaacccttgggtcttggatcaggtgttgagcgtcaaggaggttgcgtccgggaaggtcaccacgcgatatagctatgacgccatggccaagccgaatgccgtctatcgcgctggagcgctactgcagagtgtgacttatgccgcggatggcacgatcagtacggtgcgtgacggaaagggaaatacgacccaaatccaggactggtatcggggtgtaccgcgactggtcaccaatcctgatggcaccaccaacagcatgtcggccgacggaaacgggtggatcacctcaaccacggatgcgctgcagaggaccacgtcctatcagcacgattcgatgggtcgcgtgaaggaggtccagccaccagtcgatgagaaccagtggaccaagacaaccatctcgttccagcaggtcgcggccgatgagtacggcctttcgccgggacactggcgagtcgataacgctcaaggggcacggcgtcaggaaacctatctcgatgcgctttggcagccgctcctggtgcgcgaatacgatgcaaacgacatcgcggggacccaacggtgggtcaggaacagctacgacagcgagggtcgcccgatcttcacttcctacccttcaaaggatagcaatgtggcgaccggcacctggactgagtacgacgcacttgggaggaaaacttcctcggcccaggacagcgagcaaggcctgctgatcacgaccattgcctacagcagcaatgctacgactaccgtcgttgatccgctcggccatcagacgattacccggtttgatgcctttgaaggaccggactatgaacggcctgcgcagatcattcgtgccgacggaagcaaagtcagcataaaacggaatgcatttggcctcactaccgaagtggcccagtccgcaaactgaaaccacgtcaaggatggcattcgtgaacactgaaaaactgcgcatggccgcggcggttctgctggggctgatgatcatcttcctgtgccaggtggcacacgctgacgcttggattgaactcactgggccagcccaagtctcctacacggcaccagcaacctatcagttgcagctcaaaagtggcgtcacaagcactggccccaaagctgagtatctggaagacatacagctcacgcgcaatggccaagtgatctcccgacttccgaacgggacctataccgagaacggcctgtcggcgggtacgtatcagtatgtctacaaggcatttggcgtgcgcaacttcaacggcaatgagtcttacagacagctgatctcacccacgatcacgatcacggtggcggcaccgccaaccccatttgacggcgcggagtacgtttccgcaagctggcctaattcggccgatagaggaaccccgttcagcggtactgtcaccttccggaacacgggcaacacaacgtggcgagcaggggaaggctatcgactgggtcaggccgagcgctacgtttccggcgccacgaaactcggaattgccgaggttgccgtaccccacgacgtggctcctggtggcacagcaacgtttgcgttcagcggagtagcggccagtgaaaacggaccgacaacgctccaatggcaaatgaaccggaatggtgctcgcttcggtagcaccagcagcgagcagatctttgagacgaccggaaggctcaatcgcggcgtcatgtatgagcaagaggtcccgaccagcatggagaccgggcggacctatcgagtcaagctgaagttcaccaacacgggtaacacgacgtggtcggcgtcggcgggctatgcattggggtcctggaatcccaatgacaatgtccgctggggcagggcgcgggttccaatgccgaatgacgtcagtccacagctgcctgcgttctttgaattcgacgtggtagctccttcattgccaggtgtctacagcttccaatggcggttgctggaagagggcaaagaatggtttggtcgggaaagcgacaatgttcaggtcacggtcaacgggccgccgtccaaggtaatcggcaacatcgatggtgtcaccagcgacggtcagattcgaggctgggcgtgctcgacgggcattgattcgtcgattgacattcatgcctacaccggtggagccgccggcagtggtgggacgatcttcctgaccggcaaggccgacttggcgagtgagccggccgtggctacgtcctgcaaggctggaggcaatcatcgcttctcgcttcagatgagcaacgagcagcgccgcctgcaggctgggcaaccgatctatgtccatggaatttcccccgttggacaacccaacaacacccttgacggctccggatcagttgtagtgcctgaggcgcccagtggcacgctttccgcaactccggccacgtgccagattgcatcggatgcccagacctgcaacatcaccttggtctggtcggccacggattcgcgcgcggagctaaagcgtgatggcggctcggtggtaggcagtggagccagcggctccgttgttgtgccaatcggtgccggaacgagccgctttacgctctcggtcaccggcgacgcggttgccacggcagttgccaccgccaaggccgctcctgtcgtgcccgtcaatccagacaatccggccccgacggttgcccggagatacgtctacgacgacaacctccggctgtgcaaggtcatcgaacctgagactgggtcgagcgtatttggctacgacgcggcggggaatctctcctggagcgcaaccgggctggatttgcccagcgtgacggaatgcaatcgcgacgcgccccagattgcttctcgccgtgtttcgcgtgactacgacgccagcaatcgtctgcaggctgttgtatatcccgatggtcttggggatcaacagcttgagtacaccccgactggccaattgaagatcgaaaaggtctttaatcaggatcggattgcggttgtcaccactcgtacctacaactcactcggggcggtgacaagtcagagccgtgtggtgggtagcgctagcgcccggtccctggcatttggctacgaccctatggggcaacacatccgtacggactatcccgatggctactccgtccggcagtccttgaacgccttgggccagcccgtacagctgcaagatggcaccggcgccgtgctcgccagcaacgtcgcctacgcccccagtggcgaaaccaccgcgctgacctacggcaacggcatcgtacgtggcgtaatcgagaacgcgcgacagttgaccgaccgtatcgtcgacggtggtgtgatcgatctgaagtatagctatgacgcagcaggaaacatcacccagatccgcgatggcgtgcgcggcgactccgggacgatcagcctgggctacgaccgcctcgaccggctgattcaagccagtgctccagcctatggtggcagtgggcaatacacgttcggctatgacacgctggacaacatcgtctcgatgcggttgccgggaaagcgggagcgtacgttccactacgacgcccgcaatcgcctggagttgctgcgggaccccggtggcaatggcgtctctggcttctcttacgattctgcgggcaatctggtgacgcgtaacggtcaggcgctcacctacgatataggcggccagctccgttcagtgggagatgtgcagaagtacttctacgatggagcaggacggcgtgcacattcttcagtacccactgccccgcccatctcaggcaaggagttgataaatgttgcccacgactgggaggtgtccatccctggaggcgatgtaggtctgccggatctttcggtcggaaatctagaccacacttggcagtacttggtgggcggggagctgatcgaatccaccgagggcgaggaaacctccgactacatctacctcggcaagcggttgctggctattcgcaccagctccgccacgggcaacacgctcacctatcttcatcacgatgcactcaataccctaacggcgaccagcggcgccaacggtattgtgctgacgcgccacttctggtcgccgtatggtgaagtagatgctgcacctagcgcaaagatcccgggctattcagggcatcttgcggattcagatacaggcctaatctacatggggcggcgctattacgaacccgtcattggtagatttctgtcggttgatcctgttacagcactggatcacggagacatgcggcatttcaaccgctatgtctatgcctacaacaatccgtatagattcagggacccagatggccggtgcccatcgtgtgatagatttagcgatacatttgctaaggattctaaggctttcgatcaccctggctttatcatacccgcattcgtcgtaacagctgcaatggcagctcccgtcgtgtgggagcttggcatgatagccctcgctaacccaggaacagtcgccactgcagcgaacgttgcggctgacgcagctggtgtgacgggcactgccactgggggtacacttgctgttcgggctacgcgcggcggagagaatgctgccgctgcaactggacgcgcagctcacgccgctctagcccaaaggattgcagcgaaacctggctggcagtctgagccgcgaatgattggagctgacggtaaggtctacaaacctgatgcagtcacaccgaatggtcgaatcctcgagttgaagccgaatacaccttctggtatggcagcgggcgctcggcaaactgcaaattacgaaaagcagctcggcatgcgtgcacgagtcatctattacgacccggataaatttaaaaagccatgacaataaagaaactcattgcgcgcacagatgaggtccttgcaccccttggattcaaccgaaagggcgcactttggaatcgcacgattgattcaattgttgaggttattgatattcaggtaggtaagtctggcgatactgcgacgattaatgccggtgtgttgcaagtcgacgccttcgagaaagcatggggctacaagcctcaaggatttgtggaagagcccttttgcatcgtgcgtgctcgcgttggagagatcgtcaacaatcacgatctctggtggcctctgaatgatgaccaaactccaaagaacgtcgccatgacactgggaacacatgttctccctttcttggaaaggtcgcgaactcaagaggcaatggaggcattcttggaagccgtacatggaaattaccccctgccgaagatctatctggcgatcctcaaatgccaaggcggggacattcaaagtgcatgcgctattcttcgtaaggtgcatgagaaagcgcgtggggactggagtgatagatccatggaagttgcacgaaggattgggtgtgatatcggttgaaggttctgtaaagtcgagcaggaaatacataagagccgcctggacaatcccgacattccatacgtgctgctcagcacgcctgtctgcggcggtatagccactgtcgccgaacacccagtcttatttgccatgcagcagctcatgggtgaccgtcatgtcaccgacatcggccgcagtacacttcacgtgatgcaccaggcctgaaaactcatctacaccgatatggaccttcatgtcgaagtaccacgggttgcccttgcgggtctcgtgcatctcagaatctcccgcccttgcggcgttcttggttgagctgccccgtggatgatggaggcgatccacgatcgtgcctgcgcgcaggctctggccctttcgggcaggtgcgcgttcaccgcttcaagcatcttcgccgccaggccgtgtagctccagcagacgacggacattgaggatcttggtttcatccggaatcgcatcaggaccgccgggccgggcgaacaaccgcatcgaggcgatctcatgcaatgccatggatggctcctcaacatgagccgcattgtctctcgggttgccggccagcggccggcactacccgggtagttgttcagagcatcctctttcgcgccatccatggcgccggtacccccgcgaacccgccccacccggcctctgaaggattccgggcgcgtcctaccgcggcaacgcagagaaaatcaaaagcaacagccgggggctggggcacaatcgggctttctgttggagggtctgggcgtgcatccgattgaaagcgaacgtctgcggctgcgccggatcgatccggagcgtgatgccgtgcagatgctggcgttgttgaacgatccgggcttcgtgcgcttcatcggcgaccgtgatgtgcgcagtgaggcgcaggcgcgggagtacatcgcgctgcgggtgctgcacagctatgcgttgaacgggttcggcatgtatgccatcgagcgcttgtccgatggtgcctggctgggcaatgccgggctggtgcggcgggatggcctgccggggccggatatcggctatgcggtgctttcggaatttgccgggcagggctatgccggcgaggcggcgcgggcagtgttcgcgcatgcacgcggagcgctgggcctgcacgatctgtatggcatcaccgacctggacaatgtggtgtccggaaagatcctgctgggcctgggcatgcaggaacgcggggtgatccagctgccgggcgtggacagcccgagccggctgtatgccacgccgggcgcggccgaggtttgatcatagtgggtgccgacagttggtctgcactgcatcggcaggacatccggtagtgccggccgctggccggcaacccgggatagcactggggtcagagcccgccttgcgggatccgaccccagtagattgcctcaaccgcgcagttcggccagctgtgcctgcagctcggccacggccgcttccagctgggccacgcgctcggccaggcccgggtcggccgcatcgctgctgccgctgctgctggcgtacttcgccgccagcgccgcgccatccacttcaccgcacagcaggtgcatgtagcggtcttcgcgctggccactggcacgcggcagcaccaccagcagcgcacgctgctgcaggcgctcgatggcatggcgggcttcgtcggtgtcggcgaagcggtgcaggcgctcgctgcgcgtgaccagctcgcccagcgtctgtggaccgcgcagcagcagcagcgccagcagcacggtctgctgccgggtcaggtccagcgcggcctgcaggcggtgttcgtagcgatcggcgcgcgaggagaagtgctggcgggccaggcccaacgcctccagctggcgcagcgcgtgctgcacgctgccagcgtccacgttcatcaccggctcgcgcgcggtcttctggttggccgccgattgggccgcgttgaccgtcagcgggtaggtgtccggggtggtcgcctccttctccaccaggcagcccagcaggcgggcctgcacggcgtcgagcagggggacgtcaggggtctgggcggaatcggtcatggcggcctccggaagggcaacgggtcaaccgccaagcatagccgtcccggggccggctttgccggtaaaatgcgccggtatatctgattgccggtgaatccatgcgtcgtcccgtttccctgtccctgaccctgctcgccactgcggcgctgggcctgtccgcctgcaagcgcgtggaggcgcccgccgccgaagccacggccccgcaggcgcccgctgccgccgccaaggccgacggcgcgctcgatgccaccgccaacgacaacctcaacgcagtgctgtggatgcagcgcgcgcaggagtacagggcgatcaccgagcagacctaccgcgccgccgccgaccacctggatgcggcgttgaaggaagcccactgggatgcgctggtgccggaagagcgcggcaacgacgccaagggcctgaagccggccgtggtgctggacgtggacgagaccgtgctggacaactcgccctaccaggcgcgcctggtgcgcgatggcaaggaatacgacgaactgacctgggaccagtgggtagccgaaaagaaggccaaggcgatcccgggcgtggtcgacttcgccaaggccgccaatgccaagggcgtgaccctgctctacatctccaaccgcgccgtgcacctgaaggacgcgaccctggccaacctgcgcgagcagggcctgccggtggccgacgacagcgtgttccttggcctgggcacggtggtgccgggctgcgagcaggccggcagcgagaagaactgccgccgccgcctggcagggcagaagtaccgcgtgctgatgcagttcggcgaccagctgggtgacttcgtcgaagtgaccgccaacaccaacgacggccgtgacgcgctgctgcagcagtaccacgactggttcggcgagcgctggtggatgctgccgaacccgacctacggcggcttcgagccggcgcagttcaacaacgactacagccagtcgcgccaggcccgccacgacgccaagcgcgccgccctggactacgccccgtgagccgcgcaccgctgccgttgcgcgccgatgagcgcctgatcttcgcgctggacgtgcctgatcgcgtgcaggcactggactgggtcgatcgccttggtgacagcgtggcgttctacaagatcggcatggaactgctcgcctccggcgagtacttccaggtgctggatgagctggcccgccgcgacaagcgcgtgttcgtcgacctgaagttcttcgacatcccggcgaccgctgcggcggtgatcaagcgcctgtcgcagtggccggtcagctacgccaccatccatggctggcacccggcgatgatggaggcctgcgcggccgccaacagcagcgacatgcggctgctggcggtgaccgtgctgacctcgatggggcgcgccgatctggcgcagatgggcgtcgaccgcgagccggtggacgtggtggtcgaacgcgcgttggccgcccaggcagcgggcgtcgatggcgtgatcgcctcgggccaggaggctgcaccgatccgtgccgcgaccggtagcgggttctcgatcgtctgtccgggcatccgtcccggtggtccggtcggcgatgaccagaagcgcaccgttggcgtggcccaggccttcgccgatggcgccgacgccatcgtggtcggacgcccgatccgcctggcggctgatccgcaggccgctgcgcaggcaatccagcaggaaatcgcgtcggctctggctgcacgctgagcccaccgctgacgccggtcacgccggcaccacgaacgccattccgatccatgcgggatggcgttcgcaattgttggcctgcgactgtcgcaggcagcgcattgcaccgaaactgtgcgcgcgttcgcgctgcaggcttcatccctgcttcccaatcgatgcaccggcacggaccgcggccgcgccggttccaaccattgatagaggagtacagggatatgtatcgcagcacctctttgttcatcggcctgttgttggccgcgtccgccgtacccgccttcgctgcgccacaggtgcgcgaagcaccgcgcatcatcggcggtgaagcagcgccggctggcgagtacccgttcatggtcagcatccagggcatcttcgacggcgattcggatcatgaccgccacttctgcgggggcaccctcatctcgccttcgtgggtgctgaccgccgcgcactgcatgcagggggaagcgccgggcggcatcgccgtcgtcggcaacgccgcggccctgtccaccgaagcctcgccccgcgcctccaacgtcaaggcgatccacgtccatccggcattcaacagcggcaactcgctggagcacgacgtggccctgatccagctcaacgcccccctggacggtgcacagccggtggcgctgcggctgcggcccgacgccagttatctcaagccgggccgcgaattcaccgtgatcggctggggcgacaccgacatcggcgatggccgggtctacccgacccagctgcagaccgtgaaggtgccgttcgtggcattcgatgaatgccagcaggcctacggtggagaactgtcgcgcggcaaggtgatctgcgccggccgcgagggcatcgacagctgccagggggactccggcgggccgctgctgctgcgcctgcgtgaaggctggacccagttcggcatcgtcagctggggcgagggctgcgcgctggccggctatccggggatttatgcccgaatcgccgaaaaacacgccgtagatttcattgaatccgtctggcagcacgattgattcaataaaatcaaatacatacatggcattacgtgaagtgttgccttaacttgaagggcagcgtaggatcgccgccatccggtcctcggaccggacatgtgccacaacactgtcctccggccccgtgccggtttgaagagcctgtgatccccgtgatccgggctctttttttatcccgctggtggttctggggtcagatcccttctgcctgccggcagaagggatctgacccccttggttggaaacgtgaccgcacggcttgccgctgtcacgtcgcaggccgcaagatgcgggccggtccggggagtccgagtgcatgagcgtggcggtgcgaggaaggtctgcgcgtggatgggggctggcggcgatgctgctgctggccgttgcggcatgccgcgagtctgtgaacgatccggccaggccggcggccgaaccggtggctgcggtgcaggcgatggcgttgcgcctggccgaagatgatctggtcggctacgcaaagctgtcggtaccgccaggccagtatcagcggctgcagcaggcctgggcggagggacacagccagtggccgctgaccgagctgccgctgggggaccagctgctgccgatgctggccgcgctgcgcaagcccgatgccagcaccgaactgcagcgcagcttcgaccgccagctggccggccaggccagcgccgtgcgccaggccgcgcagtcgatgggcaatttcggggtgcagtacctgcgccatcagaagggctacacgcccggccagcaggcccattacatcgccctggtcgaaacccttgccgtttgggcgcagggcgcgccgatcagtgaccgcgcccgtgcacgcagcaccatcgccgcgctggtcggcgcggccggcaaggtcggcttcgatgacgaggctggcctgcaggcggctggcatggagggcagcctgcagcagctggcgccgttcatccacaccctcaaggcggtgcttggcagctacgggctgggcgtggatgacgcgcttcgcagcgtacggggcgagctgctctcggtggaaggcgacaatgcgctggtacgcctgcactacgacctggccggccgcgagatgagcctgcagctgccactgagccggcgcgagggccactggtacctgacccgtaccctggccgacaccgacgcgctgctgcgcaaggccgacgcggcccgcgcggctgcgtcgccggcagccgctgaagcccccgccgaaggtggggaagcggcaacgccgccgcctaagccataatggcgccgatgtcgaaacagaacccgctgccgttccccggcgaagaatcccagtcgacgcccgccgatacggtgccggcgtccccctcgaccggtaccggcccgaacccggtaccgccgcccgcgcacgcgcgtccggccggccgccgcccgctgtgggctcgcctgctcggccgcctggtcgagccgtggctgtcgctgaagatcgaaccggaagacccgggccagtacaacgatggccgcccggtcatgtacgtgctggaagactacggcctgtccaacgcgctgatcctggacaaggcctgccgccaggccggcctgccgtcgccgctggtgccgctggccggtgacccgaccggccgcaagcgcgcctacctggcgctgtcgcggcgcagttccagcaactcgctgattcccgagcagcgcggcgccaagacccactccgactcgctggccaaggtcctgcaggcgcaccgcgtgcgcgatgacctggacgtgcacctggtgccggtgtcgatcttcgtcggccgcgccccggacaagcagagcggttggttcgcggtgctgttctcggaaaactgggcactggtcggccgcttccgtcgcctgctggcggtgctgctcaacggccgcagcaccatcgtccgcttcgccccgccgatctccctgcgcaacaccgtggatgaaggcctggagccggagcgcacggtgcgcaagctgcagcgcgtgctgcgtacgcacttccgacgcatccgtgaatcggtgatcggccccgacctgtcgacccggcgcctgctggtggaccaggtgctggccgccgagccggtacgcgaagcgatcgccgcacaggccaagcgcgacaactcaaagccggccgatgcctggaagaaggcacacgcctacgcctgggaaatcgctgcggactattccagcccggtagtgcgctcggccagcttcatgctcagccacgtgtggaaccgcatctatgcgggcgtgctggtgcaccacctggacaagttcaaggccgccgcgccggggcacgaagtggtctacgtgcccagccaccgcagccacatggactacctgctgctgtcctacctgctgtacgaccgtggcatcgtgccgccgcacatcgtggccggcatcaacctgaacctgccggtggtcggcaccctgctgcgcaagggcggtgcattcttcatccgccgctcgatccgtggcaacgcgctgtactcggcggtgctcagcgaatacgtcgcgcagctggtggccggcggctactcgctggagtacttcgtcgaaggcggccgctcgcgtaccggccggctgctgcagcccaagggcggcatgatctcgatgacgctgcgcgcgttcctgcgccagccgcgcaagccggtgctgttccagcccatctacatcggctacgagaagctgatggaaggcggcagctacctggacgaactgtccggccggccgaaggaaaaggaatcgatctggtcgctgctatggggcatccccaaggtgctcaagcagaactatggccaggtggtggtgaacttcggcgagccgatcgcgctgaacgacgtgctggccgagaaggcgccggagtggaagggcgaggcggtgtccgaggacgaaaagccggcctggctgtcgaccacggtggacacgctggccgaacgcatccaggtgcgcatcaatggcgccgccgacgtcaacccgatcaacctgctggcgctggccctgctgtccacgccgaagcacgcgatgggcgaggccgacctgatcgcgcagatcgaactgtgcaagaccctgctggtcgagatgccgtactcggaccgggtgacggtgacgccgcactcgccggagcggatcatcgcccacgccgaggaaatcaacgtcctcacccgcatcaagcacccgctgggcgatgtgctcagcgtcagcggcgacaccgcagtgctgctgagctacttccgcaacaacgtggtgcacctgttcaccgcctcgtcgtgggtggcctgctgcttccagaacaaccgccgcatgagccgcaccggcctggtccagctgggccgtacggtgtacccgttcctccaggccgagctgttcctgccgtggagcgaggacgagttcgcccagcgcatcgaccggaccatcgatgtgttcgtgcgcgagggcctgctgcagaacgtcaacgatgacgacggcggcatcctggcgcgcaacaccgggcagaccgacgaggtgttccgcctgcgcgcgatcggccattcgctgcagcaggcgttcgagcgctattacattgccatctcggtgctggtgaagaacggccccggcgtgctcggcgctgccgagctggaaagcctgtgccagcaggccgcgcagcggctgagcctgctctatgcgccggccgcgccggagttcttcgacaagtccctgttccgtggcttcatccagaagctgcgcgaactgcgcctggtgtggccggacgagaacagcaagctgctgttcgacgagcgcctggatgcctgggccaaggatgccaagttcatcctgggccgtgagctgcgccacaccatcgaacgggtcagcccggaagcggcccgcccggacgagcctgcgccgcaggattgaaggcagcgccgggtcctgcccggcgaacggcatgccaaccaaggttggcatctacaggcgcgaagcagtaggtccacgccatgtgtggatgggccaccgctcaggccggctcgtcgggaatctgcaggctttccagcctggcgatgcagtccttcagctgcagcttgcgccgcttcaggcgcttggactccagctcgtcctcgccgttggcggccatgcgggtgatctgttcatccagcaggcggtgctcggcgcgcagggcgacgaggcgctcgacgatctcggcggggctgtaggtgtccacagcctccgagcatacacagcgatgatgaccgccgggagaggggaatcccgatccccggccggggcggctccgagccgttagaatggaacccatgagtgccgtgatttcccttcccgatcccccaccgcgcgccgcccgcgatccgcgcgtggccgagcgcgagcagcacaagctggccaagcgcctgcgccgccaggtcggcgaggcgattgccgacttcggcatgatcgaggccggcgacaaggtcatggtgtgcctgtccggcggcaaggacagctacaccctgctggacgtgctgctgcagctgcagaagaaggcgccggtgccgttcgagctggtggcggtgaacctggaccagaagcagccgggcttccccgagcacgtgctgccggaatacctggcaggcctgggcgtcccgtaccacatcatcgagcaggacacctattcggtggtcagccgggtcatcccggaaggcaagaccatgtgttcgctgtgctcgcgcctgcgtcgtggcgcgctgtacaactacgccgagacccacggcttcaccaagatcgcgctgggccaccaccgcgacgacatggtggccacgttcttcatgaacctgttccaccacgccaagctgtcgggcatgccgccgaagctgcgcagcgacgacggcaggcacgtggtgatccggccgctggcctacgtgcgcgagagtgacatcgtcgagtacgcgcaggcacgccggttcccgatcattccctgcaacctgtgcggcagccaggagaacctgcagcgccgccaggtcggcctgatgctgaagcaatgggaaaaggaccacccgggccgcatcgagcagatcgcgcgcgccatgggtgaagtccggccctcgcagctggccgacaccaccctgttcgacttcatggcgctaggccgtcgcgacgacgcgccgctgcccgacgcccatgcctggctggccggctccccggccgacgccgacgcagatcccgagacgcccaccgtttaaggtcgggcgcccttcctcttcgccatccggaattccatgttctttcgcaacctgacgttcttccgtttcccaaccaccaccgatttttccgaagtcgacaccctgctgccgcacgccctgctgaagccggtcggtgcgctggaaatgaattcgcgcggcttcatctcgccgttcggccgcgaggagaaggaactgctctcccaccgcatcgccgaacacctgtggctgaccgtgggcggcgaggacaagatcctgccggcggcggtggtcaacgacctgctcgagcgcaagctggaggagatcgaggagaaggaaggccgccgcccgggtggccgcgagcgcaagcggatgaaggacgacctgctgcatgaactgctgccgcgcgccttcgtgaagtcctcgcgcaatgatgccttcatcgacctgcagcacggctacgtggcggtggatacctccagccgcaagaccggcgagtacttcatgtccgacatccgcggcctgctcggcagcttcccggcgatgccgctgaacgccgaagtcgcaccgcgttcgatcctgaccggctggatcgccggcgagccgctgccgaccgggctgagcctgggcgaagagtgcgagatgaaggatccggtggaaggcggcgccgtggtcaagtgccagcaccaggaactgcgctgcgacgagatcgacaagcatctggacgccggcaagcaggtgaccaagctggcgctgatcttcgaggacaacctgtccttcgtgatcggcgacgacctgatcgtgcgcaagctgaagttcctcgacggcgcactggaccagctggagcatgccgacgaagacggccgccgcgccgagttcgacgcccgcttcgccctgcagagcgccgagatccgccgcctgttcctgttgctggaagaagcgttcaagctcagcaaggctgactgaacaggcaccctgtgggccgccggtcatccggcggcccgaagcagcgctatgctgggcgcatgagccgtctgctgcgccgcctgatcagcccgaccccgcccgctaccgtgcagcgcgacaccgttcgcctgcgcctggaggatgccgagatcgaggtgctgcgcgtgcgcgatccgcgcgcgcgccggatcaagctgagcgtggacgagcgcggcgcacggttgacgctgccgccgcgggccagcctggtgatgggcgagcgattcctggaacagcaccgcgactggttggcgctgcagctgcgccagtaccagagccagggcctgcccgccccgttgcagccgggcgagaacggcgtgctgccactgcgcggcgacctgttgccgctgcgctggcaggaaggccgctatgcgcggctggagatcgacgaacacggcgcctgcgtgcagtggccgacccgtgccagcgatgccaccctgcgccgcctgctgcgcgagttctacgaagcacagacccgcgccgatgtcggccgctggctgccgaagtacctgcccaccctgccacgtgcacccagccgcctgcggctgaaggtgatgtcttcgcaatggggctcgctggcgccggacggcagcatggcactggacctggccctggtgctggggcgccctgaagcattcgagtatgtgctggtgcacgaactctgccacctgatccagccgaatcattcgcccgcgttctggcacgaagtggaacaacgtttccccgcgtggcgcgagcagcgcgactacttccagctggaagggcgcaggctgaaggcgatgcttcgccagctgctgtagagccgagccgatgctcggctgacgcgcgtggcgcggatatccagccctcgcgatcaacagcagccgagcatggctcggctctacaaaagctcgcgcagcgcgcgacccgctcctgctcttccttctttcttccgtgatgggcacacaggaaactgtccgtggccgggcggggtgggttgcgcaggggcgtgagccgcatggatgcggcgaccgagcttgcaaggacgtacttgcagcgacccctgcgcaatccaccccgcccggcagagcacggcttctgatttgaacgacccaccacgaggggctcagccgttggccgaaaccctcaccccgcccgcaacgccgccgctgccgcccagcgtgccgccacccgcggcgccgtgatgcacaccgcctggtcggtcaccgtcgtcaccgcgcgctccagcagctggatatcggcctcgtgctggcgtgccacatgcgggtcctcgaagaagatcgcgcgctggcagcgcccctccagcacccggtcggcaatctgtgcatcgccgcccatcgggccactctggtaacgcgtcacccacggcgtatcgctgggccaaccccggctccaggccagctcgttcaagcgctgcccggtggtgcccgtcgcaacgcgttggccaaaccgggccagcacatcgaagtgttcatcggcgaaggccagcatcgccggcttcatcgcatcatgcgcgatcagcgccagcgtctgcccctggaaagcatgcaggtcgtcggcaccggtgtcggcagccagcccggcgtggatgcgctccacctcgatccagtcgcgtgcagtggccacggttgaaatgaacggcttgccgtggatcacgcactgccgcttgagcgcggttgcttccggaaacaccgaggacggatcgaccgggtcgatcaggtagatcgcaccgtccagtgtccgctccggccccatgccgaccacttcggccaccagcttcatcaggcctccctcgcgcccgtagggataccggtgcaggccgccgtagccggccaggaatccctgccgttcgatcgcatcgtgggtgcgcccgaccgcatgcagtgacacccccagttcgcgcaggcctgcctcgctggcacgcagccagcggaacagcgccgcgcgcgcatcatggtgatggagacggttggcagccaggccgatacgcatcgagcgctccgtaggacgggtagaagcggcagtgtatgtcggcattcgccgatgcggatgcttttccaatttttctcattgtcgcggaagcctgcctcgctagcgtggctggcagcggtaccgctgcgcggccgtggttcctgcccgcgaaatgaggacgtctaccgtgaatgtcgccggccgccgcgccgtcgccgccgtcatggcatcgctgttgctgcccggcatcgccgctgcatccggttgcacgggccccctgcaggtggcatggcgctccgaccggccgcccctgtcatacagccagcagggcgaggttgccggactggccgcggattacctgccgctgctgggcatgcaggcggcgcagcatgcgaagccgttgcctgcgacggtacttaccgagggagcactgccggccggcacccaggtgctgctgggctggccgcgcgcacagctgccgacaggctgggtggccagcagggcctacctggaggtgccgcaggtgatcgtgcggcgcgagggcgccgctgcggtgcggggctggagggcctgcgtggccgcagcgtggccagcccggaccggctgccgctggagccattgctggccgagcaggccccgggggcgcagctgctggcccctgcgccgctggaccacgcgctgtcactgctgcgtgccgggctggtcgacgccgtggtcgccaatctcgctgaactggaggccgcgctccgcgcggagccaggcgatgctgtggtgatcgcggcacccgcgggcttcggcgatgcactggtactcgcggccgtgccggcctgtgccgaggtggtcgctgctttcgaccagcggctcctgcaggagagcgatgcacatcgcgcgtcgagccgcagcgcctggctgccggaccggccacgcgcgcggctcaccggttcggcgctgcgctggctggtgccggcgtcgctgatcctgctcgcgctcgtgctgctgcatgccttcggctactggcgcgtgcatcgcgagagcgtgcgccgccgcgtgctggagcagcggttgcacgacgtcaccgcgaacctgccggcggtggtctaccaggcccgccgttcggcaaccggccactacagcctggcgcagatcgccggtgacgtgcaggcgttgttcggcgtaagcgtggagactgcgcggatcgaccatctgcaactgctggccgcggtgcatgccgacgaccgcagccgggtgatggcgtgcatcgaagcggccgcgctggtgcgcggtcccatcgacgttacgttccgcacccggtcggcgcagggctggcgctgggtccgctcacagggacgaccgctgcagtgcgatgacagcagcgtggagtggagcggctactggttggatgtcagtgaagcacaggcgcgtgcagtagcgctggccgaggcgcgccgcgcggccgagcaggcggcgctggccaagagccatttcctggcgaccatgagccaccagatccgcacgccgatgagtaccctgctgggcatgctggagcgattggctgccagtgacctggatgcgggccagcggcaggtgctgaccaccgtgggtgatgccgcgcagatgctgcggcagatcctggacgatgtgctgcacagccagcgcctgcagccagcgccactgcagctgcggccgaccgatcttgcggcgctggtgcgcgcggtgcagcagctgttgatgcccgtcgcggccagccgcggcctgcacctgcacagcgagatcgaccccatgctgcagcagtggtcgctggccgatgggctgcgcctgcgccaggtcctgttcaacctggccggtaatgcactcaagttcactctgcagggaagcgtggtgctgcaggcccatgtgctgcagcagcgcgatggcgggcagcggttgcgcctgcaggtgaccgatacgggcgtgggcatcagcatggagcggcaacaggcggtattcgctgcctacgagcaggccgagacctcgaccacgcgccgctttggtggcagtgggctgggcctgtcgatctgccgcgagctggcggcatcgatggggggccagctgcacctgcgcagcgcgccgggcaagggaaccaccgtatggctggaactggtgctggcggcctgtgcggcaccgacggtggtaccggtgctcacgacggccgtgcaacggccgctgccgccggcgcgggcactggttgttgaagaccatccgaccaacctgcagttgctggtgcagcgcctgcgcgagctggggctgcaggtacacgcctgcgacgacggccagcaggcatgggaggcctggcaggcgcagccctttgatctggtcatcaccgactgccatatgccgcacatggacggcttcgcgctggcacgggcgatccgtggcgatacctgtgccatccgtgcgcaggtgccgatcgtcgcgctgactgccagtgtgctggaacgcacacgcgaggcctgccgtgatgcgggcatcgaccatttcctggccaagccggtggcgccgtgcgaactgcgcgcgctgctggaggagctgctgttgccggactcagtgcgccagtaggcggacgatgctggcagcggcatcgcggccttcggccacggcggtcaccaccaggtctgcaccgcgtaccgcgtcgccaccggcgaacaggcgtggatgcgcggtctggaatggcaggcggtccttgcccccggcgacgatgcggccgttgggctggccttccacccccaggtccgccagccacgccggcacgctcggcgagaagccgaaggcgatgatcaccacgtctgcttccagcagggattcactgccttcgatcggcacggcgttctggcggccattggcatcgggctcgcccagccgggtttcgaccacggttacgccgatcacttcatcgtcggcgccggcttcgatcgacagcggctggcggttgaacaggaagcgcacgccctcttcgcgcgcattggccacttcgcgagcgctgccgggcatgttggcttcgtcgcgccggtaggcgcaggtgaccttggccgcgccgaggcgcaccgcgctgcgcacgcagtccatgccggtatcgccaccaccgagcaccaccacccgcttgccgttgaggtcgggcagggcgatggtgtcttcccagccggcaatcggccggcccttcgggtcatcgccgccgacgatgcggctgttctgcaccaggaacggcagcgccggcagcacgcccttcaggtcctggccgtcgaggccaccatcggtgtagcggtaggcgccggtaccgatgaacaccgcatcgtgggtgtccagcagctgctgcacgctgaggtcgcggccgatctccacgccgaggcggaactgcacgcccatgccctccagcacgccgcggcgccggtggatcacgtccttgtccagcttgaagctgggaatgccgaactgcagcaggccgccgatctgctcgtagcggtcatagaccaccgcggcaatgccggcgcgggccaggcggtcggcgcaggccaggccggcgggaccggccccgatcaccgccacgctgcggccggtcggctgcaccgcgcccaggtcagggcgccagccgctggccagcgcggtatcgacgatgtatttctccaccgcaccgatggtgaccgcaccgaactcttccagcgtgcagctgccctcgcacaggcgatcctgcgggcagacccggccgcacacctccggcagcgggttggtgctgtggcacagcgtggcggcttcgtggatgcggttctcctgcaccagctgcagccactgcggaatggcgttgtgcaccgggcacttccagctgcagtacgggttgccgcagtccaggcagcggcccgcctggtactgggcgtcctccttgccgaactttccgtacagctcgccccagtcgccggacgtgcgcagttccaccgggatgcgctgcggcatggtgcggggcaggtcgaggaactggaaggcgtgcttgcggctcatggcgggctctgtgatgttttgcgattgccggccagcggccggcactacgtgatcctgagttgccggccagcggccggcactaccgctacgcggcgcgtcgcagggtttcggtcagcgactcgatgctggcggccttgggtttgaccagccagaacttgccgatgtaatcgcggaactcgtcgaggatctgctgtgcccagatgctgccggtcagctcgcgatggcggccgatcaggcggtgcaggtgctggcggtagttctcgaagccttcggcggacacgcgatggatgtcgatcagctcgtggttgtagcggtcgacgaaatcacggtccacgtccagtacgtaggccaggccgccggtgaagccggcgccgaagttcagcccgaccttgcccagcaccagcaccacgccatcggtcatgtactcgcagcagtggtcaccggcaccttcgaccacggccagtgcgccggaattgcgcaccgcgaagcgctcgccggcgcggccggcagcgaacagctcaccgccggtggcaccgtacaggcaggtgttgccgatgatggcggtgctgcgtgcctcgaagcgcgcgccacgcggcggccgcaccaccagccggccgccagccatgcccttgccgacgtaatcgttggcttcgccttccacttccaggtgcaggccaccgacattgaaggcgccgaagctctgcccggcgctgccacggaagcgcagttccagcggtgcctcggccatgccctggttgccgtgcgcgcgtgccaccgcacccgccaggcgggtaccgatgctgcggtcggtgttgtggatcaggaagcgatgctcgccgccgcgcttgtgctcgatggccggggccagcaggccatccatctgcgtggccaggctgtccggcgattcgtacaggcgctgcgcggcgcagtggctgccctcgtagcggctgtcggccagcaggcgcgacaggtccacgcgcacgccgtcgcgcggcgcggattcgatctggcgcagcaggtcggtacggccgacgatctcttccagcgaacgcgcgcccaggtaggacagccagccacgcacttcctcggccagcagccggaagaagttctccacgcgctcgggctgcccggtgaagtggttctcgcgcaggcgctcgtcctgggtggccacgccggtggcacagttgttgaggtggcagatgcgcaggtacttgcagcccagcacgatcatcggcgcggtgccgaagccgaagctgtcggcgcccagcaatgcggccttgaccacgtccagcccggtcttcaggccgccatcggtctgcagcagggtacggccgcgcaggtcgttggcgagcagcgcctggtgcgcctcggccacgcccagctcccacggcacgccggcatagcggatcgagctgaccggcgaggcaccggtgccgccatcatggccggagatggtgatcaggtccgcaccggccttgaccacgcccgccgcaatcgttccgacgccggcatggctgaccagcttcaccgacaccagcgcggtcgggttgacctgcttgaggtcgtagatcagctgcgccaggtcctcgatcgaatagatgtcgtgatgcggcggcggcgaaatcaggccgatgcccgggcgcgcatagcgcagccgcgcgatcagttcgttgaccttgtgcccgggcagctggccaccctcgccgggcttggcaccctgcgcgaccttgatctgcagcacctcggcattgaccaggtactcggcggtcacgccgaagcgcccggaggccacctgcttgatcttgctgcgcctggcagtgccatagcgtgcggggtcttcaccgccttcgccggaattgctgcggccacccaggcgattcatcgcaatcgccagcgcttcatgcgcttccggtgacagggcgccgaggctgatcgccgcggtatcgaagcgcgggaacagttcgctggccggggccacttcatcgagcggtgcgggcgtggcggcagggaccagttccagcaggtcacgcagtgccgagggcgggcgcgcatgcaccgcatcgcagtactgctgccaggcacgcggatcgccgctgcgcgccgcgcgctgcagggtggtgaccacgtccgggttgtacatgtggtactcgccgccgtgcacgtacttcagcaggccgccgacatccacgtcctgctgcgcgtcccacgcctgcgcgcacagctcgcgcgcgtcggcatccaggcgcgcgaaacccgcgccaccgatgcgcgaagcggtatccgggaagcacagatcgacgacctccggttccaggccgatgatctcgaacagctgcgcgccgcggtagctggccacggtacagatgcccatcttcgagatgatcttcgacagccccttgtagacgcccttgcggtagcggcggccgatctgcgactgctcaccgcccttgctgagcttgaggatgccgcggcggcccaggtcgaacagggtctggtaggccaggtacggatacaccgccgtggcgccgaagccgagcaggcaggccatgtggtgcgggtcgcgcgcggtgccggtctcgacgatgagattcacgtcgcagcgcaggcccagccgcgagaggtggtggtggatggcgctggtggccagcagcgcatgcaccatcggccgcccggccaccgggtagcggtcggacagcagcagcatcaccatgccgtcgcgcgcggcctgttcggcctcggcgcagatgcgctcgatgccggcacgcaggccctcgtcttcgctgtaggacaggtcgagcagacggttggcctgcgcgtactggtccatcttcagcagctggcgcagcttgcgctggctgagcaccggcgaattgaggatgacgtggttcaccgtctccggaccggcatggaagatgttggtctccttgccgagctgggtggacagggacatcgcgcaatcttcgcgcagcggatcgatcggcgggttggtgacctgcgcgaaggcctggcggaaatagtcgtacagcgggcggctgcgctggctaagcaccgccatcggcgtgtcgtcgcccatcgagccggtggcttcctgctcggtctcggccagcggccgcagcacctgctccacttcctcgctgctgagctggtacagcttgtggtagctgtgcagggtggcttcgtcgaacggctcttccaccagcgacgggtcgatcagttcggtctgcaggtaggtcacgccctgctgcagccactgcttgtagggcgcgcggccgcggttgatgcggtcgaccgcgtcggagtcgagcaggtcgccgcgcttgaggtcgatcgcgatcatttcgccggggccaagcttgcccttgcgcaccacccgctcggtgggcacttcccacacgcccgcttcagaggcaaccaggaagtggcggtcggcggtcagcatccagcgtgccgggcgcaggccgttgcggtcgagggtgcagacggcgtagcggctgtcgcaggcaacgatgccggccgggccatcccacggctcgctgttcaggccgtggaactcgtagaacgcggccaggtccgggtccttgaactccagcgactgggtggccggcggcaccaggatgcgcagcgcctggatcagctccatgccaccggcgaccatcagttccagcatgttgtccaggctctgcgagtccgagccgtgcatggagatcaccgggtcgaattcggcgatgtcgaagcgcggcgtcttccacaccttgctgcgcgcctgggcccagcggcggttgccttcgatggtgttgatctcgccattgtgggcgagcatccggaacgggtgggcaagcggccagcgcggcagcgtgttggtcgagaagcgctggtggaacacgatcgcgctggaggccagttcgcgccgctgcaggtccggatagaagcggctgagcttgtccggcagcaccatgcccttgtagctgatcgcatcgggggtgagggtggtgacgtagaaatcagcgtgatcgcgcagctgctgttcgctgcggcgacgggccaggaacagcgccagcgcgaagccggcatcgtcctggccgacaccggcatcgacgaacacctgttcgatgcgcggcagggtatcgcgcgccagctggccgcagacgctgtcatcggtgggcacctcgcgccagccggcgaccttgcagccgaccgcttccacctgcgcctgcagctgggtacggcaggcgtcggcggcctcggtgtcgtgcggcaggaacaccaggccggcagcgaagcgcgcggcggtggtgatgccggcttcgctggccagcagtttcaggaatgcatcggggcggcgcagcagcaggccacagccatcgccggtcaggccatcggcggcgacgccgccacggtgggtcatgcgcgaaagcgcggcgatggcggtatcaaccaacaggcgcgaaggttgatcgtcgagctgggcgaccatgccaaatccacaggcatcgcgctcggagcgcgggtcgtaaagcccttggcggttgcggggggccatctctacctcgatgcgtatagggttggcggcgacactcgtccccgctcattccctggagcgcatcgtgaggccaccggatgcctcgactagatcacaggttgctgcagcgccgcaatacacggttgcaggtgcaacagaacgcgccggcaacccgtgccggcgcggggtcggcctcagccgcagcgcacgccgctgaccaggcccttgtcgtccacttcgatgttcaggcggtcgccgaggaattccatcgtggccacgtcgttgggcttcatgacgcgcagctggtgggcaccggcatcttcctgcgcctgcttgcccagcgcgtcggcgtaggcctggccgaccaggctctgcacctggctggcatcgcaggtgccgaccggcggtgcctcggtggccttgccggcttcgtcggccggtgccttggcggcttcggcagcctgctgggcatgggccgtggccgaatcctgttcatccagcgccggtgcctggcaggcggtcagggccagcacggccggcagcagcagggcggagagcgaacgggcgcgaatcgggaacgacatcatgactccggaagggattgtgaaagcccgagcatagcggcgaaccgatcctcacgtgtttgtcttgtgttatcgacaggatcgcggcagcgcggcagcgacactgcgcgcatgccgaccccctctacccccgaacgacaggccgcgcgcgctgcgggcctgcgctatgtcgatgacacccagccgggcatcagccggcgccgcgccggcaagggcttcagctaccgcgatgccgatggccacgcggtgcgcgatgccgccaccctgcagcgcatccgcgcgctggcgattccaccggcctataccgccgtatggatctgcgcccacgccaatggccatctgcaggccaccggccgcgatgcccgcgggcgcaagcagtaccgctaccacgccgattgggccgcagtgcgcgacgccggcaagttcgaccgggtgatcgcctttggtgaagcactgcccgcgctgcggcgccggctcagccgcgatctcaagcacagcggcttcccccgcgaaaaggtgctggcggtcgtggtcgcgctgctggccgacaccctggtgcgggtaggcaatgagtcctatgccaaggaaaacagatcctttggcctgaccacgctgcgcaaccggcacctcgacctgctgcgcggcgggcgcgtacggatgcgcttccgcggcaaatccgggcagctgcacgaagtgacggtaggtgaccgccggctgggcacgctggtacgcggcgtgcagcagttgccgggccaggcgttgttccagtatcgcgacgacgacggtgccatccagccggtcgactccggtgcggtcaacgattacctgcgcgaggtgatgggcgaggaattcaccgccaaggatttccgcacctggggcggcaccctggccgcggtgcaagcgttcgcggccaccgagttgcccgaaccggccagccagcgtgcgctggccaaggtacagcgtgaggtggtgtgcaaggtggcgacccagttgggcaatacccctgcggtgtgccgcaaggcctacatcgacccctgcgtgttcgccggctgggagcgcggcgaactggcggaactggccggcctgcgtgggccgcgccagtgggaacaggccaccctgcgcgtgctgcgcagggcgcgccggctcagccgcagacgtcagccgcaatagatcgcggtgatgttgttggtgcggcccttctcgatggtcaggcggtcaccgccttcgtgtgccggcggcacgcgcgggccgtcatggcgcagcacctgcacgtgcaggctgtcgctgtccacgcgcgcgcgctcgacggttgcggcggaggcggccaggccgagcgcaccacgcaccctgtcgctgtggcactggccggaaatcacgccgtcgatcggctgcacctgggccaccggcgtgctgctgcaggcggcgagggcgagacagacggcggcggtggcgatggcatgcttcatggaaggattccttggtgtggttgcgtgcagcgtgcgacggcgcacgtggtggcggaatgaacaccgtgcacatcgtggatacggtgcgctcacccccgccaacagcctgggtggagacactgcagtcgcggcggatgccgcccccggtactgcggcgcatgcgcccggtagtgccggccgctggccggcgatcccattccccccccgaggagacctgcatggccaccacccgaaagacccccgcccgccgcaaagcctcacccaaggtgcgcaaaggcagcaccgcgacccagaccgctgccgaccccgctcgcccgcgggtggtgaagactgcaacccgcaaggccgcggctggtgatccccgcgccgcccgcgttgccgcccggcagcggcgcctgcaggaccaggaaaaggccaaggacgcccgcgcggccaagaaggccacgaaaaagaccgcgacccaggccggcgcacgccgccagccggaggccatgccggcccagcagctggcaaagccggggcacgaacacgaactggagctggcaccgcgcttcctcgcgccggactacaccggcagcggcaagctgcagggcatgcgcgcgatcgtcactggcggtgattccggcatcggccgtgctgtggccgtgctgttcgcacgcgaaggcgccgatgtggcggtcctgcacctggacgaggccgaagatgccgacatcacccgccagcacgtggagcgcgaaggtggccgctgtgtggtgatcgccggtgacgtgcgcgacccgcgcttctgcaacaaggcggtcaagcaggtggccaaggccttcggtggcatcgacatcctggtcaacaacgccgcgttccagctgcactgcgagcggctggaggatctggaagacgcgcacctgcaggagacgctgcagaccaacatcggcggctacatccagatggcgcgtgcggtactgccgcatctgggcgagggcgccagcatcatcaacaccggctcggaaaccggactcttcggcagcaaggcgctgatcgattactcggccaccaagggcgcgatccatgcgttcaccaaggccctggccagccagctgctgccgcgcggcatccgggtcaactgcgtggcgccggggccggtatggacgccgctgaacccggccgacaagcaggccggggatgtcgccgagttcgggaaggacagcgacatgggccggcctgcacagcctgaagagctgtcaccggcgtatgtgttcctggcctcgccggtctgtgcaagctacatcagcggggcgatcctgccggtgatgggtggaccgcgcggctgagtcgtgtcggttcccgcctggatccggcggcagcgaaggtgtgcggcctgtcaaaggccccacaccgtgcgattggggtaggctgatcctgtaccgaccatgttcaaggaccgaccatgcccgaaatggatatcaatgccgcagccaacgaggtcgtcgccctgctgcggcggaacgatgcgcgtgctgccgccacccgcctccaggccctgcacgacggccagagcgcagtggtgcaggaatcgctggatcgctatatctcggcgcgtgcggccgccgagcttgagggcttgcgccggaacgggggcgtggccgcagcggatgcagctacggtgaatccgatgctggatcgcttgggcgaggcgacgcgcccgccgcggatgcccgatgctgccgagacagcgggattgagccaggcccagcagtacgacgtttatggcagcatcgtggcccagcgcggcaacatcgcagcgaacgatgcaatggcaacccaggaccgcgtggtgctggggttgcgcgatgagaaccgcacgaccgaggcgcgcggacgtggggtctacgatgaccgcatcgtggtgctgtggaaggatgcgcagggccgcggccatgtgcgcgagttcaaccaggccacgaccgagccgaccgcccagtacgacggccatgccaagaccgcgccgcgcagcccgggctttggcaatgtggcgccgcgtgccaagaccgagggtgaggacgtcaacggcgaccgggtcaaggatctggggcgcctgggcgagggcaccatcgagatgcgcgcgaccacccatccgcgcaatggccatcccgatgagttcgcgctgcgtccttcgcaggacgcgatcactgcgggcgccggacgggtggagcgcgacagcaatggcgatggctggttcgatgcgcgtgatacccagggcgtgcaggacctcaacgacaccttcaagatccatcgtggcagccgttccaacaccgattcggccggttgccagaccatcggtggcggcgagtatgacgacttcgtgtcgacggtgcgcggcacgcctgggcagaaccgctggcagtacgtgctgacctcggttgcacccggccagacgcgcgaatttgggcaggacgtgccgctcgcggccaacgatgacccccgtcagccgcagcatcgcgatcatgccctgcagcagcagatcagtacgcgcctgcaggccctgggcggacgctacgccgagcatgccgaggactacagcctggtgatgctgcgcgaagcgaaggccgcgggcatcacccgggtcgatcagatcgtggccagcaatcccagcgccggccgtgcggctggcgagacactgttcctggtgcagggcagcccgggcgatcctgcggcgctgcgcgcaggggtcaatgcggccgaggtgcgcgagaccgcggtggaatccagcctgcgccagctgcagcagcaatcgcgcgaacaggctgcacctgcgcccgcgccggcacagcagcaggacgcgccggtgatgggagggcgttgatcgatgatccgatcgcagctgacgccgagcgttccattgatgctgctgctggcctgcagtgcctgcgcgcccgctggagagcgcgtcgcgccggtggcgcccactgccagctcggccgcgaaaccggaggccctgcctgcgcagacccttcccacggaccgcggactgcccgcattgccgaaggcttccggcagcggccatcccggcggccgctacgctacgctgcccgaacctgccaggcaggtgctggcgcagttgaagtgcaacgtggagagcgccagcaaggtggaggtgctctccattcccgcgcaggatggccagcaggatttgatggttactgatcgcagcgggccgcgtttccgctattggatgcggtcgttctccggcagtggcggtaccaccggctatctggtgcagctgcagggctgcccggcaaccaccacgggcatgcgcgcctacatcgcacagggagccgcaccgctgcaggatgtcaccgcatccatcctggcgcaggccggattgcccgatgcggcgaccatgacggcctaccaggacaagggcgcgggcgatctgttcgccttcatcggcgtgctggacaaagtgccagtactgcgctgggtggccgaagccgaccccgaacagccactggccgccgatgcacgcagcttcgaccatggcaatgccatccacggcggtttcctgcactggaaccaggatcacttcgaagtggccagggccgttcccgccgcgctatggccctgcgatgacagccccttgcggccgtgcaaggccgacccgttcgtgacggggcgttgaggcatcgcgcacatagaagtcggcaatgcgcggaatgaactgctgcggattggcaccgacaagattggtcagcaccacgaccgccacgccgcgctcgggatagaccacgaaggccgagcgcgcaccgccgataccggccacctgaaggtcgggcgatgcgcgcagtaccgcccagccacccgcccacgggccggcgcggccatcagcgaggcgctctgcgctccacatccgctgccgggccgggtcctgaagcaaacggccttcggtcagcgcgaccagccagcgcgcggtgtcgtcggcggtggtgaggatgccgccaccggcccagagcgaaggcggtatgtcgtagaaccagtgcgacaggcgggacggtgcatccacagcatcggtggcacgcggggccaggctgtacatcgtcgccgcatccggaatcaggtcgtagctgtcgccgaaggtggtgcgggccatgcgcgcgctgctgaactggcgtgtggccaggaaacgttcgtaggacataccggattgctgcgcgatgatccgtgccagcaggacatagttggtctggttgtaggcgaagcgctgcccgggcgccgcttccagcggccgcgctgtcaccgccgtccacgcctgtgcttcggagccaccgcccagcagtccgttcgcatcaaggatgtccggaaggcctgaggcatgcgccagcaactggtgtacgcgcacgtctctccacgctggcggaagatcatccaggtaacgcgaggccggcgcgtccagatccagtcgtccctcctgcgccagctgcgcagccgccacgccggtgaatgccttggtggccgagttgagcgggaagcgggtgtcgcgcgaggcacgcacaccgttctcgacattggccagaccgtaggcctcggacagcacgatctgcccgtccttgaccaccgcgacctgcaatccggggatgcgctgctccagcatgatctggcggatcaggcggcgggtctggtcgttggcctggtcctggctggcagcaacggcggcgaagggcaatgcactgatgagcatgagcagggcacggagcattgggcgggacatgtggaattccagcggggcgttgtggatcggatgcagcgggcgggtcaaaggtttaggcgctcggtggtgcctaccgttcgtcggcccatgacttccggggggttgactacagttgtcgtcacgcagacagtggcgacacgtgtagtcaagggagtggtgtcatgcgtggcaagacgatcggggaccaggagctggccctgctgcagtacatcgatgaacatgcgccggccacggtcggcgaggtcgccagtggctacggggaggcccgtgggctggcccgctccaccgtgctgacgatgatggagcgactgcgggcgaaggggtatcttcagcgccagcagcaggacggtgtctaccgctaccaggccacgcgtggcccgcagagcgtgctgcagggcgcggtggcgcagttcgtcgacaacaccctgcagggctcggtgtcgccgttcgtggcctacctgtcgcagcgccagcaggtcagcgacaacgagctggccgaactggaagcgctggttgcccaactccaatcgcgccgccacgagggctgagccatggacaccacgatgctgatcccgatgttggaacggctgggctggaccagcctgcagaccgtgctgctggtggccctggtgtatggcgtatgccgcgcgctgccgtcgctgtcggcggcaacccgctgccgcctgtggtggctggtctcgctgcaggctgtgctcggcctgttctggagccagccgttgcagctggcctggttgccggcgccgcaggcggtggcgatgagcgcgaccgatgtggccgccgacatggtctacccgctggccccggaggcctcggcacagctgttggccgcaatgccgatgcccgccgcggacgtgccggcggtggcatggtgggccgtcgcactggccacgctgtggatgtccggcgtgctgctgatggccctgcgtaccttcggtgagtggcgtcgctgccgcgcgctgctggcagcggcctatccctgcgaggacgaggcgctggtgcaggccctgcagctggcctccgatgcgcacggcgtgtgtcctgcgccgcggttgtggatgagcacgcaggtggacgcaccgcagctggtcgggccgttccgcccggtgctgctgctgccggcgggcgacaacgccctgcagggcgacgcgctggacctggccctgacccacgaactgcagcacctgcagcggcgtgacctgcaatggggcctgctgcctgcactggcccagcacctgttcttcttccacccgctgctgcgcctgtcggtgcgtgaatatgcacaggcgcgcgaggaagcggtggatgcagcggtggttggccagcacggtgccagccgccaggcctatggccgtctgctgctgcagctgggcgtggcaccgcagccgcatctgggcgtggccagtgccgcaccggataccaccagcctcaagcgccgcctgctctcgctgcagtcgcgccggtcctgcccgcgcatcctggcgatggcgttgactgcggtggtgctggtggtgggcgtggcgccgatgcggctggtcgcagcgccggtgccgccggcaccgcccgcgcctcctgcggcgccgaaggtcgtgccgccgccgccgccgaaggctccgaaagcgccgcccgcaccgccttcgtccgcgcgcgttccggccgtgccggtggcgcccgcgccgcccgccgagccggctgatgtcgaggcgttgtcaggtccggacgatgcggatgtggcggtcgacgtggatgcggatgtcgatgtcgataccggcatgcagtgaacacacgacctcccgcaccacttccatcaccacctacggccgcctggacctgggcaaatcgccgccggaggccttcgtgctggtagatggcgattcgaccttcgccaacggcggcatggacgacgtgacggtggcccgcagacagctcggcaagggcccggcgctgtggttccgcaagggcgacaagcgctacgtggtgcgagacccgatgatgatccagagcctgcagcgtgcctacagcggcgcggcggatctgggccgccagcagagcgaactgggccgccaacagagtgcgctgggtcgccagcagggcgaactcggcaggcagatgggcgagatgggccgcctgcagggcgaggaggcgcgccgcatggcactggccgctgccgaggctgcgcgcagcgcggtggccgcgcatgacatcaaccgcgaagcggcggcagaagcggcgaaggcggcgcggggcgcgaccaacgatgcggccattgcacgtgaggctgcacgtgaggctgctgcagaggcacgtcgtgcgatgcaggaagtggacaacgaaaccgcgcgggccacccacacccgcggcatgcagcgcctggccagccagcagtctgaactggccagccgccaggcggcgctgggcagccggcaggctgcgttgggtgagcgtcaggcacgcgtgcatgagcaggcgtcgcggcaggcgcagcaggtgatcgcgcgcgcactggccagcggtaaggccgagcgactctgactggtagtgccggccgctggccggcaatgtggggtgccggccagtggccggcacccactgggttgatcaaccgcagctggcgcgctcgatccggttctgaccgtccacctgcaccgtcacgcggtcctggcggaagtccatggttaccgccatgcccggcttgaccacgcgcgcgttgcgggcaccgctgtcggcgaccagtttcttgatggtggcctcgtcggcggtcttgccggtgaaggcttccagcgcttccggcctgcattcgtgggcggcatcggccaccggtgccggtgcggcatcgtgggtggtgctgctgccggcgtggctgcaggcggccagcggcaggatggcgagcagggcaagcggattgaggcgcatcgtcgggctccaggcgtggatggtggcggcagtgtcaccgctgccaccgtcagggcatgtcaacgcggccgttggccattactgcccgaccagcgccagtgtttcgcgctcgcgctgctcctcgcgcaccagtcgctgcagcagcagggccagggtgaccacgtcctgatggttgtggtcggccacccgacgcaggttcaccgcatcgccgccgcgcaggaaacgcagccatgcgcccggggcttcggagccaggcaggtcatcctcgcgcaccacgcgcagcagctggcgctcaatggtggacagcttgcagttctcccacgtgccgcgatagcggcggcgggtcgggtagagcaggtcgacgtgatccagcgcgctgatcgggcaacgctggcgggccagccggtagcgcgtcttcagcagcggcgcatcgtagctgcgcccgttgtagctgcagaacacggtggacggctgcagccagcgggcgaaggtggccagcatcgcgtcctcggcggccatcgtcgacatcagcaactggcggatgcgcaggccttcgccacgctgcgggcacacatgccagtcggcggcgccgatcatgaaggcgcgggtgccagtgccgccggccaggccggtggtctcggtatcgaagaacagcaggtcgcgcgcggcgacgtgctcgtgctcgcgcctggcgaaagccagggaaagcggttccgcgggaatcgattgcggctgcagcgactcgatcaggaacagtcccggcgcgatttcctcgccggggagctggcgatcctgggcactggcgcgtgccggtgcggctccaccacgcgagcgcaggccgagcaggcggtgcaggctgcccacttccggtcgacgcaacggtgcggcggccgtcacaggcgcggcagcgccggtcggcttgtggcggatttcctgttcgacccaggcgaacaccgagcgctccgccggtggctgccgtgcatcgttggcggctaccggggccggcgccggggggggcggctcgggtgccaccggcgtgaccgctttcgggtcgccggcctgcttccgcagcaggcgcagcttgtccaggctcaggctcacggtgccagcagctccatcggctcgcgcgtggtcaccaccacgtcgcgcacgtgctggcaggcttctgcgtcgaacaggtcgagcacgcgcagcgccagcgcgcgcggcgaggtttcatcttcctcctgtgcagccagcaccgggccgacacaggccgggcaaccggccttgcagtcgcaacgctgcaccagttcgcgcgcgcgctgcaccagctcggcctggcgctgccacagcggctcgctcaggccaacgccgccaggaaagttgtcgtacagataaacggtcggcacgaactcctgcagcagctccaccgcgccagggtcgccttcgctgccgcgcagctggccacggccgctctggtcggcgatcgcgaaccaggcaccatcgccgttgccgactgacttctgcagatcgcgcgcatcggccatcaccgccacggtggcgacgatgtgcagggcatacgcggcgccaaggaagccatccagcgcatcctgcttgctggcgaacgcgcgcagcagcagcgcctgcggcagctgccaccacaccgcagtggtgtgcagttcctggtcgggcaggttaaccggcccatagccgatgttctcgtgggtgtaatagcggatcttcttgtagccggccacgcgacgcaccacgtgcacttcgccatggtgcgaatcgccacggccggccacgccaccgtcgaaacggtccagcaccttgagcttggtgaagtcgatgctgtcggtgtagtaatccacatgggtgcgggtgacataggccttgcggccgtcccagtccagcgtctccacctggtagggcgtggactgcaccatgtggatggcgccttcgtacagggtgagtgcggcggcggaataatcgacctcggcgatgatctgctggcggccgtcgctgcggtcgaccaccacgaagttgccgtcggccaccgcgcgcaggctcaccgcgttggccggatagctgtcggcgatccattcccagcgctcgccttcgcggtggatgacttcggtttcggccagcgcttccaggaacacttccggatcgatcgggccgaagccatcgccaacccggaacggcagttcgaaggctgcgcagcggatgtggtcgaacaggatcagcggctggtcaggtgcaatgcgtgcatgttcgggcgaggcctcggcgaagaagtccggatgccgcaccacgtactggtccagcggctgcgagctggccaccatcacccccagcgcgggctgctggcggcgaccggcgcggccgaagcgctgccaggtggcggccacgctgccgggatagccattgagaatgaccacgtccaggctgccgatatccacgcccagttccagcgccgacgtgctgacgatgccgtcgatgttgccggcgcgcatcgcacgctcggtctcgcggcgctcggtgggcaggtagccgccacggtaggcgcggatgcgcggcggcttgcgcgggtcgtggtcgaagatgtccttcaggtacttggtcagcacttcgaccatcaaccgggtctgcgcgaacaccagggtcttcagcccggacttgatcgcgatgcgcgcgatgcggttgctctgcgagcgtgccgaggcgcgcaggcccaggtccggattgatcaccggcgggttccacagcagtacctgtttcggtccgctgggcgcaccggattcggtgatcgcggtgaccggtgcctcgatcaacgcctcggcatgcgcctgcggattgccgatggtggccgagcacaggatgaactgcggttgcacgccgtagaacgcgcagatgcgcttgagccggcgcagcacgttggtgacgtggctgccgaacacgccgcggtaggtgtgtacttcgtcgatgacgatgtagcgcaggttctcgaagaactgcgcccacttggtgtgatgcggcaggatcgcctggtgcagcatgtccgggttggacaccacgatgtcgccatgcaggcggatcgcctggcgcgcatcacctggggtatcgccatcgaaggtgaaggccttgacgcccagatcgccggcacggttgagttccagcagctcggccacctggtcctgtgccagcgccttggtcgggaacaggtacagcgccttggccttgtcctgcatcgccgcgctgaccacgggcagggtgtagcacagcgacttgccgctggcggtgggggtgacgatggccacgtgctcaccacgctggctggcctcccaggcctcggcctggtggctgtagagctgctcgatgccgcgtgccttcagggccgcggccagggccggcggtaccgcatcgggaatgggggcgtagcggccctcgcggccgggaatggcaaagctgccggtgatgcggtcctggtagcggcgctgcaggcgcgcgctgagcagggcgccgtcacgggcgggcaggccatcgcgggtggcgagcttctgctcggcatcggcggtgcgcttggcgagttcgtaagccatggaaagtggagccgggacggattgcgaggggtcacatggcaccacatccacgtctcaggatgtgagacatcgcacacggagggcgtgaaccgttcagtgctcgcgtcccgtggcgccgccgcatctcccctggctgaacagctgccagtgcagcaacgaaatctgaagccggcatccgtatccttgggcgctggacgcaaccaacagggcggatggctgtggcacgacgtggaacgcagggagcactcctggccggcatgctgctggccggcatcgcgcaggcgcagcaggccgcgccggtgtcggtgcccgatcctgcacccgttccccctgctgatgccccggcagcagccaccgcgccgatctccaccgccctgccgcaggacaacgtcaccaccctcggcgaggtgcgtgcactcaagcccgacgacgagccgttggacctgtaccgcttcaagaacccggtgaagttcggcgacaaccgcttcagccgcgactggagcgagccaccgtcaccggagcaggtcagcatgggcggcggctacatcatgatgggcgtggtcaagggcgtgctggcggcgggtcggggcctgaacaagctcaccggtggccccgaccagatccagtccgccatcgcccggccaccgcctgagctcagtcccgaacagcggcagcgtgcgctgcggttctcccagcagcaggatgccggtgatgcaccgccggtgaagtaggccggtatatcctgccggttcctcaaccgatagcgctgccatgttcctgcgttcgttctgcctgctggctgcattgctgcccgcgtccgcctttgctgccggcatcgccggtgatggcgcgtgccgcaatggcgcgttcccctccgaacagagccggttcgcgctggcgcgggtggtcgacgcaccgcgcctgtatctgctcggcgacatggacgggtgccccgccaagggcgaaccggcctgccgccagcgcagctatgtggtcaacggcgatacggtggtgaccggtcgcgaccttggccgctaccgctgtgcgttcttcccgaacaaggtgggcggcagcgccggctgggtggaccgcagcaagctgcagccgttgccggtggccgtgccaacgctgcaggactgggtgggccactggaaagacggcgacaacggcctgcgcatcaccgtgcagggtggacaactgcatgtggatggcgacgcctactggccttctgccaaccccacgccggaacagcgcccgtatggcccgaacatgggccaggtggaagcgcgcgcgacgccgcgtggtgctgatgtcgagttcgtcgaggacacgtgccgggtgcgcgtgcactcgctgggcgaggtgctgatcgtggccgacaacagcgaatgcggtggcatgaacgtgcgcttcaacggcgtgtaccggcgcgcggggaaacgctgaaggacgcatgacggagggggtcagagccctgtcgtgggcgaaagggatccgacccagggtcagcgccgccgctccagccaccacagcagcgaggcgcacaccgtgaacgccagccaccagggccagcgcgagcccggcacgggctgcatcatcgccgtgttcgtcggcccgctgacggccagcgcccgcgtggttgcatcgatcatcgcctgctggtgcagtgcaggtgcggccttcgggtcgaacacatagcgccagaccgtggtgtcgccgtgctgcaggcgctgccaacccgcctcgcgcggccaccagccggcgcagcgcagggtcgacgttgcgccgtcgacgatcaggggcacgctgtctccgcgcgcgttgaagacctgcagtggcgcctgcacgccgcacagcgcctgccgttcgcccgcccagccgagcgtctgcggcgaccacagcgcatcaccgctgccctgcgcgcgcgccagcgtggcgacgacgctgctccagagttcaccgtggcgatcatcgcgtccggccagcacccagcgccagctgtcggtgatcggcagcaggccgatgcgacccttgccggcagcgcgccagccgccgacggccttgcccgacccatcccgcagcagggcgttgctgcctggcgcctgcagcgccagtgcttccagcgcgggcaggggcgcactgtgcgagctgcggtcagcctcctcgccgtagccggtcggcagcgttccggcggcgagcgggccgcgtcgtgcggcgaggaccgcgctgtcgccatcgccgggaagttcgagggcgtggctgctgccatcgccctgcactggcaggcccagatcgcggaggcgctggcgcgcgccggctgcaggtgcgcctgcactgcgcaacagaacgccaaggccgtcacgcaacgcctgccgcacggcagccagctggccggcactcaatgcggtcaggctgcgctcgtccagcagcaacagatcgctgcgcgcgagtgacgctgcatccagcgcgaccgcgccatcccccacgctgacacctgccccggtatcggcctgtacctgcacgcggatgccggtatcggcggcccagcggcgcaggtacttcagctccgggcccggcgcactggcacgcaccagcatgcgcagcggtgccgccggcagggtctgctgcggtaccggcgcgctgtccaccacatgaccgccggcatcgagcaggcgcagctggaacacgctgcggccctcggcgcgggcgatgccgctgagctgcacgtgaccgtcctcggcaacgtccacgcgatcgaccacgctgtcggcggggtcaagcagttccgccttggccttggcgacgccgcgcgcctgtgcatgcacgtcgaagcgtgcgccgggcgcggtgtcggcgggtggctgcagcgcgatccacccgcgcgtcggagctaccggctgccagcgcacgtcgcgtggcagtaccgcgtcgcggtcacgcgcgaccaggccggcaccgaccagcgtcagcgtggaagccggatgctggcgcagcgccgtggccaggtccggcacgcgctggcccccaggcacatcggcagcctcaggcaacagcagccgcgggcctgcgctggccggcaacgcgccggccttgtcggcatcgattcccagcacgaccaggccgactgcgggttgctgaccggtgggcgggaccaggcagaagtacagcagcgtggcagcgatcagctgcagcgcaatcacgatccactggcggccacgacgcgcggcattgccacgcagctggcgcacgctggcgatgaccacgatcaggacgagtgccagcgcaatccacaggttcacagcggaggcgttcatggctgcacctccagcgcatcaaggtaccgctgccccatcgcatcggcggcgttgcgccgcattgcctgcggcaggggtcgctgcagcgcgcgccatacctgtgcgcgcaggcgctggcggcagtcgcggcagccgggttcgatgcgcagctgctcgatggccgcggccaggtccagcgcatcgggcagataggcggcgttgcgctgctgccagctggcgagtgcgtcgaggtcgggcacgctggtgtcatcgccgaggcgctgccacgcttcgacgatggccggatcgggcgggatgcgggcggccaacggcagttcacggctggccagcccagcgcgatcgccgcccagccgacggccttcatcgatcggcggcagctccggccccacccgcgccagatagatgcgttcggcctgctgcacctgcttgatgaaccccagtgccttgtaggcgaacggcagtgcctgctccggacggccctggcgcagctcgccttcggccgaccacatctggtccagcgcggccttcagcgtggcgcgggtctgtgggtcgagcagggtcgcggcctcggcatggtcgtgggtgtggccgtactccgacagcacatcggtggcgctgccgaacaccggtggcgcatcggcattggacgccttgccgccgtggtcgtggccatgcgcgtcgtgcgcaccggcctcggcgccatggtcgtgatcgtgttcgtcgtcgtggccgtctgcggtcggcgcatcgctggtgggcaggtcgctggtcggcggtggcttcggtgcaccttcgctttcttcgcccaggaactggccatagcgtaggcgcaggatgcgctggtcgacaccgatcgcatcgctgcgtttcacgaagtcctcggcggcgaggctgcgtcgctgccggatcagcgcttcggcatcgatgatgatctgccgctggctgcggaaataggccggcagggtcttcttgatgcggccttccagttcggcaccgagtgcaacctcggcgctgggcaggcgcaggatcacgctgctgctgcgcccggtctgcggtgttggcgcgtggttgtcgcgcacttccagctgggcgatgacatcgttgcccggttgcgcgcccagcgcagccagatcaagcgtgtgggcgaaacgccgcgcggtggcttcgccgctgccggcaagcgtcacgctgcgtttcacgaaggtgatgttctcaccgctgccctgggtggaggtgatcgacagcgttgcctgcgcggctacgccatagtcgtcggtggcctcgaagcgcaacgaccactggcgttgcccgggcgtgcccagcaccaggctggcggccggctccagcacgcgtacgccgggcgcgcggtcggcgaccacgtccagacgatgcaggtcggttccggccaacgccggctcgctcaccacgcggtacagcaccggcgtgcgcgccacatcctgtgcctgccactggccatcatgttcgttcagcggcaaccggcgaccatcgtggaactgcagccatgccttgtccggtgcgcgatcgaagcgcaacgaccacgacagccggctgtcggcggcgaccttggcatccagtgcgttctgggtgagcgtggcctggccggtataggccggcgcgtcgatgcgcatgcgggtggactgcaggtgcagtgggcccgcggcagccgtgctgccaggcgccgacgcacgggccggcgcggagccggggctggaacgtggccagccgaatgccagcgcaacgatggccaggcctgcgatccagcacagcgccaatgctccacgcggccagcgcgaacgcaggtccggcatcgcgcgctccagcgtcgccagcacatgcgcgcgctggcgctgctgcagcggattgagggtaagcgcatcggcaaacagcaggtcggcactgtcctcactggcgccgctgccatcgagctggcgctgcaaccactgcgggtccagctggcgggaacgtgccgtggcgagcgctgcgcaggcaagcaggccgatggtgccgaccacgcaggccatatcgaagcccgccaggcgcagcgccagcaccgttgcggccagcgcccacggcaggcccagcagcagggtgacgagcgcacggcggcggcgcgcgtgctgccaggcgagctgcagggtgatcatgcgggccccctgcgtcggcgactgctggccatccagcgttccagcgcaaacagcagcacgatggccagcagcaaccacggggtgagcttgcgcagcggcggcgttgccgcaggcagtgctgcctggcggggggcctggtcccgggcatcgccaaggcgtggcagtggaggcggctgcagagccagcagcagcgcgcgtggcaactgcggatcgcgcagcgcagcgttgcctgaggcatcccagtcgccgggcagagacagcaggacaccgtggccgatgcgttgctgccacagcagcggggtgccctcggtgttgcgcagcaggatgctggcctcggcggcaggcttgccggcagtcactacacgtccgccgtcctgcagccacgcctgccagttcgccggcagtgcgccagtgcggctccacacgccgatctcgccgcgctcgggcagcgcatccgccaccagaggcgcgagcggcgcctgcctgccccacgcgcgctgcagtgcattcaaccagtgctggacggcggccgaagcatcgctgtgcacgcgcaggcgcggcaacgttgcggcactcggttgctcactcaccggtatcggctgcggacgccactgcacctcgcgcgacagctgcaggcgtgcgccgtccaggccgggcaggggatcgggaacgtgcacggtcaatgcggtgcccgcaggcagctgtgcgtccagttcgcgcagcaggctgggcagggaagccgtggacgcgggtggcacttgatcaatggccgggaagccgggcgccagccaatgccagttgcccgcttcggcggtgccgcgtagtgcggtcgcgtccagccctggggctacgaccgtccacgcagtgggggctggcgcaggcccggtcaatgcaggtcgtgccagcagcaaggccaacgcggcaagcaacagcaggcgcaccagcagcaacggccagtcatcgaagcggatgcgctggcgcggccggatctgtgcacgcagccagcgcagcgcggcgaaatccagcggtgtgtacggatggcggcgggcgaggtggatcagcagcggcagcaaccctgcagcgagcgcggccaggcccaacgggaacagcagggtcatgcgccgcccctgcggccaaacagtgcctgcagtggttggtccagcggctggtcgagccagccagtggcactggcgatgccgctggcctgcaggcgcgactgcaatgcgttgcgtgcgtcagcgaagcgttgcaggtagtcggtgcggatcgccgcgccatcgcccagcagttcctcgccggtctccggatcgcggaagcgatggcctgcgtcgaagggaaagtcacgctcgtcggcggtgaggatctgcagcagtgccacttcgcggcgtgcgctggccagtcgttccagcagcacaatgccggcctcgtcaaaaccgtcgccgatcgccagcagcaggtcgcccgggcgcacgcgctcccacagcgggcgcaggcgatcggccacaggccagccgccacgcgcctgcagcgcatgcagttgcaggtgcacgcgatcacgctggcgtgcgccgttcgctgcgggcaccaactgcagtccatcgccattgatcgccagcaggccgaaacggtcgccctgctgcagggccagttccaccacgcaggcggccacaccgcgcatgtggtccaggcgggtgcgctgcggtgccgcgcgatcggcctggccggccgaggcggtggcatcaagcagcagccagaccgtgatcgggctttcgcgttcggattcgcgcacgaagaagcggtccgagcgtgcatacagcttccagtcgatctggcgcagctcatcgcctggttcgtaggcacggtactgggcgaattcgaggccggcaccgcggctgcggctggcgtgctggccgatgccactggcgccgctggccaggcgtggccgcacgcggagcgtgcgcaggcgcgcacgcagttccggtggcaaggtcagcggggtaccggcgttcacgcgtggctcaacccgggaacggcacggcctgcagcagggcggcgaccacgtcgtcggcacgcttctgctcggcctcggcggcgaacgacagcagcaggcgatgacgcatcaccggcgcggccagtgcctgcacatcctcgcgggtggcggcaaagcggccctgcagtaatgcgcgcgcttttgccgccagcaccagcgactgtccggcgcgcgggcccgcgccccacttcacccactggttgatcgcggcgggtgcgccttcgcctgggcggctggcgcgcaccaggcgggtgatccaggccagcacatccgggctgacatgcacctggcgtacggcggcctgcagcgcgatcaccgcctctgcatccatcaccttcggcaccgcgtcggtggcgccgccggtggtctgttccaggatctgccgctcctcgtcctcgctggggtaatccaccagcacgtgcagcaggaagcggtccagctgcgcttccggcagtgggtaagtgcccgcctgctcgatcgggttctgtgtggccagcacgaagaacggcgccggcagtgcgtaggtggtgccggcgtagctgaccgtgcgttcctgcatcgcttccagcagtgcggcctgggtcttgggcggggtgcggttgagttcgtctgccaacagcaggtgggtgaagatcgggccctgctggaaacggaaatggcgatggccggtgccgtggtcttcctccagcagctcggtgccgaggatgtcgctgggcatcaggtcgggggtgaactgcacgcgccggaactgcagttccagcgcctgcccgagcgagcgcaccagcagggttttgccgagcccgggcgcgccttccagcaggcagtggccgccggccagcaggccgatcagcagctgctcgaccacggtgtgctggcccaccacggcgcgtgcaagcgcggcgcgcagcgcatccaggcgtggcaacagggaatcgaggtcgggggaagtcatgggcgtgccggtcctatcaattgttcaacgcgtacatcacgatgttgacgccgaagcgggtgttgtcttcggccaggaaacgcttgttgcgccagtcgtagtcccactcgcagccgtagtccttgttgctgtagagcagccccaggcggccatcgacctcgatgcccttcaggtagtcgtgcaccaggtcgtcgccccagccgttgagttcgaagctggtggccggcgggccatcggggaaacggaagaagctgcggtacagcgggtggctgttgggcagcttctgcagtgccctgggaccaaacaggcggcccatctgtgcctcgaacgaggtggcgaacagcccatcgatatcgtggttgcagtcgtcgacgaagacgaagccgccattgcgcacatagcgcacgaagttctgccgctcggcggcattgaactccaccagcgtgtggccggccaggtagcagaacggcgcttccagcatgcgcgggtcggccagtgccaccacgtgctcctgcgggtccacgcgcagcgaggtgtagtcgatcagcgaggtgatcaggttggacggcatgcgcgcgtccacgtcccagtcaccggagtcgtactgcaggcgggtgaaccagaagtcgtagcgcgaactgcgcgggcctgcctgtgcccaggccggcagcgccgccgccgaagcggcagcggccaaccagcgcaggcaggcccggcgatccatcagacggcgtcggacagcgaggtgaaggtgaaatcgcgcagcttcatcggcgggatcatcatcacgtagctggactcatcaccggccacacgcaccggcttgcccagctcttcgatgttgttgagcatgatcaccggcgactcgttgaagcggaagttcttcaccgggtgcttgatctggccgttctcgatgtagaaggtgccgtcgcgggtgaggccggtcagcagcaccgtctgcggatcgaccatgcggatgtaccaggtacgcgtgaccaggatgcccttctgggtgccacgcaccagctcggcggtgcttttgtcgccaccgctcatcagcaggttgcccggcgaggccttggcggtcttgccctgcttctgcgcccagaagcgcgagtagtccaggttggcgatcttgccgttctcgatgatggccatgcgctcgcgcggcaggccttcgttgtcccacggcagcaccggtgcgtccggatgccacggatcggcgatcatggtcacgcgcgggtcgtagacctgctcgcccagcttgttgccaccacccttcttcgacaggaagctgcggccttcatcggccgagcgcgcactgaagaagttcatcatgaagctgatcaggcctgccgctgcggccggctccaggatcaccgtgtacttgcccggttccagcgccttggcttcggccgactcggtggccttgcgcatggcgatgcggatgtcctggtcggccttgaagtcggccgcatccttcaggttgcggccgacccagcccgagccgcggccatcttcagtgcgcacggtgcaggtgtaatcgaagttggtggtgcgctggtaggcgaagttgccgttgctgttggcggtggcctggaagccctggccgtcctcgaggaagccggcggcgatcaggccgtggccacggcacggggcgatcgaatcggcggcgaccttggcacggaacgccggatcgatggcagcagtggattcgctgaaggtggggctggcgcggtagctctgcttgccgatggccggcatgaactccggattctccggggccaggcgggccaggtcttcggcacggcgcaccacgcgttccagcgcggcatcgtcgaactcgttgatcgaggcggtgccgacgcgcttgccgaaggcgacggtgaccgccagttcggtgttgtcgacgatgccactggtggagacattgttcagcgcgaaacggatatttccgctgatcgcgccggccagcacggcggtgcactcgtcggccttggacagggcgatgaccttgtcgaggatggccttggcctgggcttcggtgaagatactcatggtgtaagggctcctgaccggtcagccgaggctgcgtgcggtgttgatgacgttgatgccgttgaagcgcgcggtggacgagccgtgcgagaccgccgagacctgtcccggctggcccttgccgtcgaagaacgaaccgcccaggcggtagtcgcgttcgtcggccacggcggtgcaggcgttccagaactccggcgtgcggatctggtaagccacgtcttccagcatgcgggtgatctggccgttcttgatctcgtagaacagctggccgccgaactgcgcgttgtagcgctgctggtcgatcgagaacgagccatcaccgatgatgtagatgccgttctccacgtccttgatcaggtccggcacgctcagcggcgtcttgcccggtgccatcgacacgttggccatgcgctggaactgcacgctggaccacgagtcggcatagcagcagccgtcggactcggtcttgccgaggatgtgggcctggtcgcggatggtctggtagtccaccagcttgccgttgctgatcaggtcccagcgcttgcacttcacgccttcatcgtcgtatgccaccgcgccgaggctgccgggctgggtcttgtcggcgaagatgttgaccagctcgctgccgtactggaaatgctgttcgcgcttgtccagggtggcgaagctggtgccggcgtagttggcttcgtagccgagcacgcggtccagttccagcgggtggccgatcgactcgtggatggtcagccaggtatgcgacggatcgagcaccagatcgtacttgcccggcttcaccgacggggccttcagcttttcctgcgcctgccgggcggcggcgatggcgtcttccttcatgtcgtaggaagaactgtagttgaccacgccattcgggctgaccaccttgccggcggcggcgccgtccaggtactcgtagcccaggcccatcggcgaggacaggcccgaacgggtgcggaacttgccgctgctcttgtcgatggcggtgaccgtcatcggcgcccagatgcggtgcacgtcctggtcgatataggaaccatcggtggaagcaaagtacttctgctcgttgaccaggaacagcatcgagttgacgaagctggcaccagcgcccattgcggcagcgttgacgtccagcagcaggccgaccttgtccttgatcggcacctccatcgcattcttgcggatcggcgtgcgccagctcacctcacccacgcccggcgccttggccagctgcaccggtgcggtctgcacgccggcattggccttggcgatggccgccgcctgctgcgcggctctggctacgtcggcggtacccagtgcgttggtggcggcaaagccccaggcgccgttgacgatcacgcggatgcccacgccggtggactcggtgttcaccacgttctgcaccttgtcctcgcgggtgatcacgaactgccgcaggtagcggccgatgcgcacgtcgcagtaggtggcaccggcgctgcgcgccgcctgcagcgccgcgtcagccaggcgcttcttcaatgccgggtcgaggctggactgcagctgctcggcggcgatcaccttgccgaagaaggagggcacgatcagcccgcccgcggtaagcccggtcagggccaggaagtcacgtctttgcaaggctgctctccatgtcgaaggatgggtggctcaagcgccgagactgcgcgcggtgttgatgatgttgatgccgttgaagcgggtggtggacgaaccgtgcgagaccgccgagacctggccgggctggcccttgccgtcgaagaacgaaccgcccaggcggaaatcgcgttcatcgcagatggccgtgcaggcattccagaattccggcgtgcggatctggtaggccgcatcctcgaccatgccggcgatctttccgtccttgatctggtagtacagctggccaccgaactgcgcgttgtagcgctgctggtcgatcgagtacgacccccggccgtggatgtagataccgttctccacgtccttgatcatgtcctcgacgctgagcggctgcttgcccggcgccagcgagacattggccatgcgctggaactgcacgctggaccaggaatcggcgtagctgcagccatgcgatgcatcgcggccgaggatatgggcttcatcgcgggtggcctggtaatcgaccaggatgccgtcgcgcaccaggtcccagcgctgggtcttgacgccctcgtcgtcgtagccaaccgcaccgaggctgcccggctgggtcttgtcggcgaagaaggtgacgatgtcgctgccccagcggaaacccgcatcgcgcttgtccagcgtggcgaagctggtgccggcgtagttggcttcgtagccgagcacgcggtccagctccagcgggtggccgacgttctcgtggatggtcaggaacaggttggacgggtccagcaccaggtcgtacttgccgggcttcaccgacggcgccttcagtttctcgcgcgcgtggcgggcggccgcaatggcgtcctcgaccgggtcgtaggaatcgcggtaagcggtgatgccaccgggcaggtgcaccttgccgcgcgcatcgccatcgaggaactcatagcccatgcccatcggcgaggacaggccggcgcgggtgcggaacctgccgctggccttgtcgatggcggtggcggtgaacggcagccagatgcgatggatgtcctggtcgatgaacgagccatcgctggaggcgaagtacttctgttcgttgaccaggaacagggtggaattgatgtagtcggcgcccgcatccagcgcggcggcattgagggccagcagcagttcgaccttgtcctggatcggcaccgccatcgcgttcctgcggaccggggtctgccagcgcacctccccgaccggcggcgtcggcgccagctgcaccggccgggtctggatgctggcgttggcgcgggcgatcgcggccgcctgctcgaccgcagcgcgtacggcggcctcggtctgctggtgggtggcagcgaagccccagcccccgttgacgatcacccgcacgcccacgccggacgattcgcggttggtcacgttgccgacctgatgctcgcgggtgatgaccgactggttgaggtagcggccgatgcgcacatcgcagtagctggccttggccgtgcgtgcggtggccagcgccacgtccgccaggcgcctgcgctggagggtgtcgaccggggcgagcagttgctcggcggcgatggcacgggaatgcggcagcagcaggcccgccaggcccagaccggaaaaagccaggaactcacgtcgttgcacagcgtttctctctctcgcttgcgtgcggccggcaacgggccgagccgatcacgtcaaccactcgactttcgccagcgcggggcatccgggcaagtgactgcagtcatggttgggggtgtttcggcagggcttgcagccctgcacctgctcagagccggagcaacagccacagcaacagcgggcttgctgggggatggcggggcggtgtgggtgggcagggcacgccgttaacccccctccggggtccggcccagccgctggcggctgtgcgttcgggcgcttgcgaagcagtgcttcgcaagcaaagcgccctcacccctgggggctcgatggcgccatccatggcgccaacggtcctgtccacccacaccgccccgcctctgacagattccgtgcgctgctggtaggtgtcgaccttggtcgacacatctgtcagatatcgaatgaaattcggggtcagatccgttttcctgcggaaaacggatctgaccccaagagtgtttccgacagatcgcggccaactgtcgaaggcggggtgggtccggtggcaggggcgtgagcgccatggatggcgcgaccgagcctccatggacggatttacggcgtcccctgccaccggatccaccccgccatccctcaggaagcccgctgttgctgttgctttggctgttgccgttgctgtggcttgaagcaggtgcagggcgcagccctgctcggaacacccccctcgtgcacaatggggccgaccccgcccggacaccctcctgatgtcgagcaagccgtattcagaagcctgcgagcgcaaccgcgaaccgatcgccgccgcactcgacccgtggatgggcgaccgccatcgggtgctggaaatcggcagcggcaccggccagcacgcggccttcttcgccgagcgttggccctggctgcgctggcagcccagcgaccatccggaccatctgcccggcatcgaggcctggcgcgcggaagcggcgctgctgaacctgctgccgccggtggcgctgcaggtggaactgccaccggcgcctgggctcagcctgccacagagcagcacgttcgacgccgcgttcagcgccaacacgctgcacatcatgagttgggcgcacgtgcaggcgttgttcgccgcgctgccatcggtgctgcgtcgcggcgcgctgctggcggcgtacggcccgttcaactacggcggccgctacagcagcgacagcaacgcgcagttcgatgcctggctgaaggcgcgcgaccctcgcagcggcatccgcgatagcgaagcggtgcaggcgctggccgccgaccacggattcacccgcctgggggatgtggcgatgccggccaacaaccgcctgctgctgtggcggttggggtaaaccatcggtagtgccggccgctggccggcaaccgattgccgggatgaatgccggccagcggccggcactcccttcaggccacctgcacgatatgcagcgccttcggattgcgccactgcgccagcagggccgcttcgcgcgccttggcctgctcgaaatgcgcttccttgacgtggccgaagccgcggatgtgctcggggatgctggcaatctccaccgccagagccaggcggtcgtcatccaggccgtccagcaatacctgcacggtggcctcgtaatcgccgatcagcttgcgctccatgcggcgttccgcggtgcgcccgaatacgtcgaagcggccgccacgcaggaacttcagcctggccagcaggccgaaggccttgaacatccacgggccgtattccttcttcagcaaccggccctgctcatccttcttggcgaacagcggcggcgccaggtggaagcgcagctggtaatcgccctcgaactgctgctgcaggcggcgctggaagtcgccgctggtgtacaggcgggccacttcgtactcgtccttgtaggccatcagcttgaacaggtagcgggccacggtctcggtcagcgcagtggagccgccgatgcgctcggcttcggcggtgcgcacgcgctcgaccaggcggcggtagcggttggcgtaggcagtgtcctggtactcgaccaggaacgcggcgcggcgctcgatcatttcatccagcgagcgcgacaggcgggcgtcatccagcggcaggaacgccacgtcgccaccgtgcgagggcaggccgcgcagttcgcgttcgtcgccggtgttgcgcggtgccgcagtggcaccccattcattgccctcccactcgcctggcggcagcggatgcagcgggcccggggtggattcggcatcggtgtggcggttgcgcaccaggccggcggcctgctgcacggcctgcggatcgaccacggccaggcggccccacgcaaaggcctgctggttcatcgccacggcggcgccattgagctcgatggcgcgcatcagtgagtcgaacgacagcggcaccaggccctgctgccaggcgtagccgaggatgaacaggttggcggcgatggcatcgcccagcagcgcggtggccagctgggtggcatcgagcagcagtggttcctggccgcccagtgccacgcgcacgccggcgatgatgtcggcggcggggaactgcatgtccggacgggtggtgaacgtgcccggcatcgcttcgtaggtgttcagcaccacctgcgaacggccggcgcgcaccttcgacagcgcccagtaatcgttgaccaccaccatgtcgcagcccagcaccaggtcggcttcaccggcggcgatacgcacggcgtggatgtcttcagggcgacgggcaatgcggatatgcgtggtcaccgcgccgcccttctgcgccaggccggtctggtcgagcacggtcgcacccttgccttccaggtggcctgccatgcccagcagcgcgccaatggtcaccacgccggtaccgccgacgccggtgatcaggatgttccagggctgttccaggctgtcgcgaagggtcggtgccggcaggttgtccagcagcgtggacgcatcgcgcttgctgcccttgcgcggctggccaccgtgcacggtgacgaagctcgggcagaagccgttcacgcaggaatagtctttgttgcagttggactggtcgatctcgcgcttgcgcccgaactcggtttccttcggcagcaccgacacgcagaagctcttcttgccgcagtcgccgcagccttcgcagaccagcgaattgatcagcacccgcttctgcgggtcttccagcttgccgcgcttgcggcggcggcgcttctcggtggcgcaggtctgttcgtagatcaggatcgaaacacccttcacttcgcgcaggcgcttctgcacttcgtccagctcgctgcggtcatggaactcgacgtcgctggggaagtgctcgcgctggccggtccacttgccgatgttgtccgacagcaccacgatggtgtggatgccttcggcgcgcatctgctttgcgatgtccggcacgctcagcggaccgtccaccggctggccgccggtcatcgccaccgcatcgttgtagaggatcttgtaggtgatgttgacgccggcagcgaccgcctggcggatcgccagcgaaccgctgtggaagtaggtgccgtcgccgaggttctggaacacgtgcggggtatcggtgaacggcgcctgcccggcccaggtcacgccttcgccgcccatgtgggtgaaggtgtcggtgctgcggtccatccaggtcaccatgtaatggcaaccgatgccggccagcgcacgcgagccttccggcacgttggtggacgtgttgtgcgggcagccggagcagtagtgcggcacgcgcggaaaactggcgcgcggcaacgcaagttcggcttccttctcctgcatccactgcaggcgctgctcgatcgatgcgttgttgaagaacttctggatgcggcgaccgatcacgccggcgatggtggccggggtaagttcaccggtggacggcaggatccactcaccgctctcgtcgtacttgccgacgatggacgggcgctggccccagctggccggccagttgaagaactgttccttcatctggcgctcgatgaaggcacgcttctcctccaccacgatgatgtcttccaggccctgcgcgaagcgcgcgatgccctgcggctccagcggccaggtcatgccgaccttgtacacgcggatgccgatgtcggcgcaggcggcttcgtccaggcccaggtattccagcgcctgcagcacatccaaatagctcttgccggtggtgacgatgcccagccgcgcgcgcggcgcgtccatcaccaccttgtcgatgccgttggcgcgggcgaacgcctgtgcagccttcaccgcatagcggtgcaggcgcatttcctggtccagcggcgggtccggccagcggatgttgaggccgcccgtaggcatttcgaagtcttccggcagcacgatgcggcgcgccatcggatcgacctcgaccgaggccgacgattccaccgtctcggcgatcgtcttgaagccgacccagcggccggtatagcggctcatcgcccagcccagcaggcccatgtccaggatgtcctgcacgccggccggattcagcaccggcatcatcgcgctgacgaactcgtcctcgctgccatgcggcagggttgaactgcggcaggcgtgatcatcggcggccagcgccagcacgccgccatggcgcgaggtgccggcggcattggcgtgcttgaacacgtcgccgcagcggtccacgcctgggcccttgccgtaccacatgccgaacacgccctgcacgttggcgccggggaacaggttggtctgctgggtgccccacaccatggtggcgcccaggtcctcgttcaggccgggggtgaacttcaccttggccgcgtccaggtgcttgcgcgcgcgccacagctccaggtcaaagccgcccagcgggctgccacggtagccactgacgaaaccggcgctgtcgatgccttcgtgcgcgtcgcgcagccgctgcatcaacggcagtttcaccagcgcctgcacgccactcaggtagatccgcccctcgttgcgggtgtacttgtggtcgagcgtgtagtcacggtcgatcaggtcggcggaagagggcgaagtgagttgcgcggtactggtcatggctggcccggtcaggatcggctggcaccggccgcgtgcaggcacgcggcgggaaaggcgcgaattgtagcagcgaggcccgaccggcccggcactcgcgccggcggccatgctggggttaggatcggggagagagagggaggctgcggttgcggcctggggagaagggatgtcagttgcagcaaagatcctgggcagcatgttgctggtctcgggaacggcccccgtgtgggccgcgccggcggtgccggcaccacaggagttctacttcgacagcgatgcggccgccgtgcccatgatcgtggtccagtccgacggggatgcgctggtggcgcagctgctcaaacagcgcgagcgcggccggcgtaccgtggaggccaccgtgcagctggcgtcggtggccattgcgcagggccgcaccgagctgggtgaacagctgtatcgcgaagcactgaaggatgcgccggtgcagggcagcctgggccgtagcgtgcgctggaattacggctgggacctgctgcgtcagggccagcccgaagccgccctggagcaatggcaggccgctgccggtggttcgctgagcaagccgggctggctgccacccacctatgcgctggcgctgtggcgggccgggcagaagcaggaggcggtgcagtggtatgccgcagcggtgcgtaccgagccgacgcaatggagcgacagcagccgctttgcgcagttgttgccgttgtggcgtgacgacgagcgcgcctcgctggcggaagtgcagcaggcctgggcggccgcgccgccggcctggccctgagggagggggggggccgggttgcacccggcacccgcagaggcaacggctggagcaactgcagcagccgaagcaacagcgggcttcctgcgggatggcggggcactgtgggtttgcggggccgccgtaaacccatccatgggggcttggtcgccgcatccatgcggctcacaccccgcaaacccacagtgccccgccttcgacaggttccggcggctgttggtaggtgtcgaccttggtcgacacggtaggtccacgccatgcgtggatgaaattgccagggatagaaatcgaactggggtcagatccgttttcctctggaaaacggatctgaccccagggcctcaagagcagccagccaaccgcttttgcttttgcttctgctctttttctttcttccacgtggctgatcgccaaccgcagctgttgctttcagcaaccagccacgaggggctgcgccgttcgccggaacccctcaatcgtccgcggaaaccgtccgccccgacgcccatgcccgcagtgcctctacctgctcggccatcagcaccgacagcggccgcgtcgcacggatctcgttcatcagcagctcggtatccaacggccggccttcggcgtgcgccgcatacagcccggccacgatcgcctgctcgatctcggcgccggagaagccattggccgcggccgccagcgccggcagcgcgaagtcgtcgccgttgagctggcgtcgccccaggtgcagccgcagcagctccacacgcacctcaggcgtgggcaggtcgacgaagaagatctcgtcaaagcggcccttgcgcagcagttcggccggcaactcgtgtacctggttggcggtggcgacgatgaagaccggcgccttgcgttcggccatccaggtcagcaggtagccgagcacgcggcgggatacgccaccgtcctcgccaccgctggccaggcccttctcgatctcgtccatccacaacacgcagggcgccagctgctcggccgaggccagcgcctggcgcaggttggcctcggtctcgccgtggtacttgttgtacagcgcgcccacgtccaggcgcagcagcggtacgccgaagccggcggcggtggccttggccagcatcgatttgccgcagccctgcacgcccagcagcaacatgccgcgcggcgggtccaggccggccggtgccgagccggcgatgaaggccacccggcgctggctgatccagcgcttgagccggttggcaccggccacgtcgccgaagcgcgcgctgtcatgctcgaagaacaggtggccgctgcggttgagcagctcgaacttcagccgtgccagctgcggcaggtcgtcgtcgcgcagcgcgccatcggcgtagatcagctggcgggcgatgcggcgggcatcgaccaggctcaggccctgcaggttcttcaggatcttcttcaccgcctcgctgtcgacctcgacacggcggccgccgtgttcgcgcgcataggcgtcggcctcctcgcgcagcatcttcagcagggcgttggcatcgggcaggcgcgggttgaagcgcaccgccagggcctccagctcggccggcagctcgaccttggcgccgatcagcaccagcacatgcggctcgctatggcggcgctggatcaggtcgcgcagcgcgcgctggtggctggcataccccaggtaggggtggaaatcgagcagcaggtagacaccccgctgatcggcctggcggatcatctgcagggcggcgctggcatcgggcgggccgaccggcgggtcctcgcggtccaggtcgatgcgacgcaggccctcggtgatggaccagcggtgcagggcccgccacacgtgcatcagcgtctgccggaacagctcgacgatgcgggcctcatcctgggtctcgatcacgatcaggggggtattggcgcggatcagtgcgctcaggtcctgcagttcgctcatgccggttcgatccttcgggggcgccacgatagcaaaggcgatggccactggttcagcacggtgctacctcccgtcaccaccgccggtgtacgctcggggcacgtacccggaagcgaggctggcatgaagacgatcctggtggccggttccaagggcggggtgggcaagaccaccgtcgccacccacctggccgcgtacgcggcattgcagggcaaggccacggtgatcgccgatgccgacccgcagggctccagcacccgctgggcacaacggcgtgcagggctggaaagcgcggtgctccccatcgatgtgtatcggaagaagcagtgggcgcagaagctgcccgacggtaccgataccgtcatcatcgatgcaccggccggtgcgctggccgacgatatcccccatttcctggacgcggccgacgccgtggtggtgccggtgctgccctcggcgctggatatcgaagccatcgtcggcttcctcaacagcctggcccagaacccgcgcgtgcacagccgcaagctgccggtggggctggtcctcaaccgcaccaaaccctggacccagacttcgcagcaggcgctgcagatgctggccgaatggccatacccggtggtcgcgcagctgcgtgacagccagagctacgtggtcatgaccggcctgggccgcagcctgttcgactatcgctccgcccaggtgcgcgaacaccaggccgactgggagccgctgctgtcctggctcaagctttgatgcctgcctcacttctcctgctgcatcctcttctccatggaaacccgcgatgcgtgaactgatcctgctgcgccatgcccatgccgaacccgccgtttccggccaggccgacctcgaccggccgctgtcgccggtggggctcgccgaggccgaagccgccggcaagtggttgaaggaaaacaacctgctgcccgactgcgtgctgtgctcgccgtcgcgacgtacccgcgagaccctggaagcggtgatgacggccatcggctatgtcgaaaagcgcctggaagaccggatctacgaagccaccccgggcaccctggcggcgctggtggacgagcgtcgtgacctggaccgggtgctgatcgtcggccacaacccgggcctggagcagctggtggccctgatgaccgacggcaccagcagtgactatcgcggcatgccgccgggcggcgtggccgtgcttggcttcccgcgcgaggcctcgatcgaacccggcgtggccagcctgaacgcgttctggtggccgtgatccgatgagcctggcgcggcgcagccgcttcctgctgcccgcgttgctggcgctcggcccggcctgggccgcggcgcccccaccgaccccgttgccgcccgtgtccgccgaggcgccgcgggtattgcgcctggatacccagcgctcgcggatcggcttcgaggtgcgcacccgattcggccagcgcatcgaaggcgtgttcccgcacttcgaggggcgtatcgagatcctgtccgacggccgtcaccaggtgcacctgaagatgttcacccgctcggtggagatccccggcaaggcgcgctataccggctggatgcgcggcgaggagttcttcgatgccgggcgccatccggtggtcgagttcgactcgctgccctactggccggagaccgtggagcagggcggcgccatcaacggccggctgaccctgcgcggcatcagccaccccgagtcattgcaggtcgagaaggcggagtgcgcccgacccggctatgattgcgacgtcgtcagccgcggtaccgtgcagcgaggccggtatggaatggacagctggcagctagccttgagtgaccgagtgaccttcgtattgcgtgcgcgcctgagcgaggcgccgaaaccgtgaacctcctgctgcgcgtcctggcgctggcaaccgtgttgctgggcagcggttgtgcatcgctctcgcatgccgagcgtgaccgtgccgaagcgattgccgtgcaggcgcgctcgaccgacgtcgactgccagcgcgccgaccgctgcgcgcaggactcgccattgcgtgcgctggcgggccgggcgttcaccgaatccaccccggaacagccacgccactacgccaccctgctcgacgagggcgagggtgccctggtggcgcgcctgaacctgctgcgcagcgccacccgcagcatcgacctgcagacctacatcttcgacaaggacgacagtgcccggctggtcatcgacgagctgctggccgcgtcgcggcgcggggtgaaggtgcgggtgctgatcgaccagctctcggcgatctccgacctgcagatcctcggcgccctgtccggcgcgcaccagaacttccagctgcgggtctacaacccgaccttcggcaaggcccggctgaactacttcgactatgccggcagcgtgctgtgctgcttccgccgcttcaaccagcgcatgcacaacaagctgctggtgatcgacgatgcgatcggcgtggtcggcggccgcaactaccaggacgactattacgactgggaccgcgagtacaacttccgcgaccgcgacgtgctgatcgccggcccggaggcgcgggcgatggcggccaacttcgatgccttctggcgcgccaggcgcagcgtgccggccgagcgcctgaacgatgtcggccgcaccctgctgcgcgagggcgtgccgacacttccgccggccagcttccgccgccccgagcgggtggagcgggtcagtgccgaagccaatgacatggacttcgtcagccgttccttcgtcgataccgcgttgccggtggcctcggtgcgctatgtcgccgacctgccgcgcaagcaccggcgcgagaaggccgatgcgccgctggccggacagcacgtgaccgagccgcagctggatgcgctgatcgccggcgcgcagaaggaagtgatcctgcagacgccgtacctggtgctgtccaaaccggcgcagaagctgttccgcgagctgcgcaagcgaccgcagccgccgcgcgtggtggtgtccagcaacagcctggcggcgaccgacaacccgatcgtctatgcgctgtcgtacaagtacaagcggcgcaacatgcgcgaactgggcttcaacatcttcgaatacaagccgttcccgctggatgcaccggtcgattaccgcaacctgctgcccgacccgatcgccgcgccggaaggcgacgacgacggcgagcgcaacccgctgatcggcggcagtgctgccggcagcaatgccggcgaccgtcgcgatcgcgatgagcacccggcacccgccggcaagcagggggcggtgaaccatccgcgcaccggcagtgcctaccagaacgcgcgcgagcgccgccgtgcggccggcagcgaggtcgaaacccgcctgctgcgcaccgagacccggccctcgttcctgggcagcaaggcggtcaacaagccgttgccggtcacccgcaagggcgcgcgcatgggcctgcatgccaagtcgctggtggtcgatcgccgcatcggcgtggtcggcacccacaacttcgacccgcgcagcgagaactacaacaccgaaggcgcggtgatcatcgatgacccggccttcgccgagcagctggccgagagcatcctgcgcgacacccacccgcagaactcgtggacggtggcgccgcgggccaagccgccggtgctgtccgggctcaactacagcgtcggcaaggcctccgaagcactgccgatcctcgacttctggccgtggcgctatgccaccgactacgagttcaagcccggcccggactgcccgcagccgttgccccggcaggacccgggcttccaccgctgctatgtcgccgtgggtgatttccccgaggtcaatgtcggcccgaagtggctgctggtacgcatgctgaccgcattcggcgccggcctcgttcccatcctctgaaggtgcccgcatgacccaggtgttccgcgaagccgtttccctcgagcagctcaatacgctcagccgcaacaccgcgatcgcgtcgctgggcatcgtcttcagcgcggccggtgacgactggctgcaggccaccatgccggtggacgagcgcacccgccagccctacggcatcctgcatggcggcgcgtcggtggtgctggccgagaccctgggcagcagcgccggcaacctgtgtgtggatacggccaagcagatctgcgtggggctggaaatcaacgccaaccacgtgcgtgcggtgcgttcgggcacggtcaccggcaccgcccgcgcgctgcacgtgggccgcagcacccagctgtgggagatccgcatcgaggacgagcagggccggctggtgtgcatctcgcggctgaccctggcggtggtggcggccggccacggctgagccccggacgggcggtgacggcagcggaacccagcgttccctgccgattgccccggtcgatgggtgttatggcctaaatcggctggcagcgatgacggccctccggtatcgtgcgcggatgacttcccccactccggccccccgcggcggcgtggcgcgtgtgtgccgttacctgtaccgcgtaccgctgctgttggtccacatcatcgtgttcctgccgctcatcctgatcggcatgcttcggccgtggggcgaactgcgcgtgggcgaggcgaccctgggggccaaagtggtcaactggtggcagggggggctgatgtggatcttcggcttccgcctggtgcagatcggcaggccgctgcccggcgccgtgctgttcgtcgccaaccacgtcagctgggtcgacatctgcatcctgcacagccagcgcatgatgggcttcgtcgccaagcgcgagatcgccagctggccactggtcgggtggctggccgcgcgcgggcagaccatcttccaccagcgcggcaacaccgaatcgctcggtggcgtgatgcaggtgatggctgatcgcctgcgcgaaggcaaggcagtgggcgtgttccccgaagggcgtacccgcggtggccacgaagtgggcccgttccatgcccgcatcttccaggcggcggttgagaccggcgtgccggtgcagccggtggctctggtgtatgggctcaagggcgacgcgcagaccattgtcgcgttcggccccggcgagagtttcttcgccaatttcctgcgcctgctcggtgagccggcgcggcgtgcggaagtgcatttcctggcaccgatcggtgcgcaggacctggaaggccgtcggcgcatcgcggagacgtcgcgcgcgcgcatcgtggcggccatgagcacgcagtgagggtgcggtggccctgatcccgccacccgtcctggacgccggcacgccgacgctgcacgcggctgactaccagccaccgcgctggctgcgcaatccgcacctgcagtcgatgctcagctccagccgcatgcgcctgcagcgcggcctgctgctgctggccgcgaccggcgcgatcagcgaggaactgatcctcgacggcggcgacggcgtgcgcctgcagggctggcacagccatgtcgaaggccgcgaacccaagggcatggccctgctgctgcatggctgggaaggcagtgccgaatccagctacatgcgcatggcggccgcgcgcatgctcgaacagggcttcgacgtggtgcggctgaatttccgcgaccacggcaatacccatcacctcaaccccggcatcttccactccaacctgatcgacgaagtggtgcatgccgcaggcgatatcgcccagcgctggccgcagctgccgctggtggccgccggctactcgctgggcggcaacttcgtgctgcgcctggccctgcgtgcgccggcggccggcgtgccgctgctgcgcgtcgcctcggtatgcccggtgctggacccggcgctgaccatggagagcatcgagaacggcccggcaatgtacgactggtacttccggcgcaagtgggccggttcgttgcggcgcaagcgcgacctgttccccgaactgagcgactgcgacgaccgcgtgctgaagctggacatccgcgcgttgaccgcctggctggtcgagcgccacaccagtttcggctcgttgcaggcctatttcgacggctactcgattgccggcgatcgcctgtcctcgctgcaggtgccggccgacatcctgatggcacaggacgacccggtgatcccgtacgcgaccttcagcgactggcagctgccgcgcaacgcgcacctggaaaccgcctgctggggcggccactgtggcttcctggaaaactggcgcggtgacggcttctccgagcgctgggtggcgcagcgcctgcagcgcgtgctgcaaggctgaaccggcacgggcgcgcaggccgctacaatgcgggtttgcccttgaaccggaccgccatgcaagaccagatcatccaagcgttgcgccagaacgaggccgaccaggccgtgcagctggcccaggcgtggacccgtgatgaacccggccaggccgaggcccaccgctggctggcgcttgcgctgcagcagcagggcaaggccgaggacgcgatggaggccctgcagcaggcgctgcagctggccccggacaatgcccagctgcacctgcagcacgccggcctgctgctggccctgcgccagttcgacggcgctggcgaagcactgacgcgcaccaccgggctggacccgaacgccttcgctgcctacctgatgcaggcccacctggcgatcggccgcaacgatttcgatgaagcgcagcgcctgtccaccctggcctcgcgtgtcgaaccggaccacccggaactgctgaccatcgacggcatgatcgcgctgcgccgcgatgatgccgatcgcgcgctgacgctgctgtcggccgccaaccaggcccagcccaacgacattcgcgtgctctacgcactgggcttcgcctacctgggcaagaacatgctggccttcgccgagcaggcgttccgccgcgtgctggaactgaacccgaccatcgcctcgctgcatggcctggtggtgcagctggccatgcgccagggcaacctggacgctgccgccgaagcgatgcagatcgcgctgcagcagcagggcctggatacgccatcgatgcgccgcctggccggcgaactggcactgcgcggcggccagccgctgcaggcgctggagcacctgctgccgttgctggaatcgctgcctgacgaccgcgacgtactgcagttgctgctgatgtcctggcagcgcctgggccgcgaagacgaggcccgcgcacgcctggatgccgccctggagcagcacccgcagctgcacgacctgtggctggcacgcctggcggtggaagaggtcgcacagtggatcgccgatgacatcggtcgagcgctggatggacgcgatgccgggccacctgccggcgctggaagcgcgcctgcgcctgcacgacatggtgggcgaacacgcccaggccgaagcgatcgccgagcgcatcgtcaacctcgaaccgggccgcgtcagcggcgaaacccgcctggtcgaaggactgctacagcgcgatccggccgccgcggtcgcccgcgtgcaggcgctgatcgacatggcaccggaaggccaccgcgccgacctgcgcacctggctgggtgagatccaggatcgcgccgggcagcacgaagacgcgctgcagacctggctggcactgcaggccgaccaggcaccgcagcgcctgccgctgccgccgcaggccaaggcgccgccgagctggccggacaagggcgagatcgacggtgatgccacttccgcgccgatcttcctgtggggcgcgccgggttcgggcgtggagcgcgtggcgaccggcctggccgccgccagcccggtgctgcgcagcgaccgctatacctccaacgcacccgacgacgcgttccagaactaccacacgctgcaggaccttgcctcgggcgtgctgaccccggagcggctggtgcagcgctggcgcgaacagctgccgtcgcgcggcgtgcaggacgacgcgatcatcgactggctgctgtggtgggacaacgcgctgctgtgggcgctgcgcccgcagctgccgcagggccgcctgctggtggtgctgcgcgatccgcgcgacatgctgctggactgggtggcctacggtgccgccgcaccgctggcaatgacctcgctggccgaagccagcgaatggctggcgcgcgcgctggcccaggtcgccgccctgcacgaggacgatctgtacccgcaggtgctgctgcgcatcgaccagatcggcaacgatccgcaggcgatggccgaactgctgggccgcctgttcgagcggccgatgccgccagccgcgcaactgggtgcgccgcgcttcccgccgggccactggcgcaactaccgcgacgtgatgagcgccgccttcgccaagctcaccccgatcgcggtgcgcctgggttatccggaagagtgaggacacgccgatgcaactgagcagccacagcctgaccaacggtgcaccgatcgaccgcgaattcgccgccggcgatgccgcgggcttcgcaccggaccgcaatccgcacctggcctggagcgatgtgccggagggcacccgttcgttcctgctggtgtgtgtcgatccggacgtgccgaccgtgccggagacggtcggccgcaccgacatgagcgtgccgcgcgatcagccgcgctgtgatttcgtgcattgggtaatggccgacattccggcctcggtgcgcgagatcgccgcaggcagctgcagcgacggcttcgtggtgaagggcaagtccgaaccggccggcccggccggcagccgccagggcctgaacgacttcaccggctggttcgcaggcaatccggacatggccggtgactacctgggctatgacggcccgtacccgccgttcaacgacgaacgcctgcaccactacttcttccgcgtgttcgcactggacgtggcatcgctgcagctgccggcacgcttcaccgccgccgacgcctaccgcgccatgcacggccacgtgctcgccgaagcggcactgcacggcacctacaccttgaacccggcgctgggctgagagcccttgtagggccggggcatgcccggctttgctttctgcagagtcgagccatgctcgactttgccttgtagagccgagcccatgctcggctgcttctgctacgcaatggacctgcagtaaacagcaaaccctgccaggaacgcatccgcttcggcgcgatgcacttccgactgaagcacctcgaagatctcctccggttccaggcccagcaccggtacacgcaggaacagcgttgtactgaacgcggcactgaccgtggacagcaccgcgcgaagtgcctgcagcatgtcctcgccacgatgggacgcatgcactaacgcaatgggccgaccgacgatctggtcgccggatacgagccagtcgatcgcattcttcaatccgccgggaatgccacgcacgtattcagggctgcacaccagcacaccgtcgctgcgggcgatggccgccttgaagcgcgtcacgctgcagggttcatcggtgccttccagatcgggggagaacaccggaagttcgccgaccccggcgtagacctcgatctccatgccgggcggcgcgatggctttcagggccaccagcagagcggtgttggtcgactgccggcgcgcgctgccggatatggcgagaatcttcatcgtggcaaggctggcacgtggggctgcgtcgacgctacagaacgtagaagggcgacctcgtggccgcccttctgtttatttaattcttctcgatggccgactcgaccaccatgtccagcacgtacgcctgcgagggcgcatcggctggcgggttcttcacttcgtagcgcttcacgcgcaccacgttgcgcacgccgtcttcgtgggtgtagccctcgatggtgccgtagaagttctcgaacttgcccggctcaccctgcttcaggcccttgtcgtcgaacttcacttcgcgcacctgcaggcactggtagtccgggatcagcgggtgcgagcacttctgcgtcttggcggccacttccaggaacacggtttcgccggcgccgccgtagcgggtttcagcggtcggctccgggttgaacaccagcacgtcgcccttggcgttggtcagcgtcagcttgccatcggcatcctgctcggccttcagctcgccctgcaggcggctcgacacggcttcgtccagcgccatcagcgccttgtcggtgcaggccatcatggtcgaggccatcgcgctgaccgtcagcttgccgtcggccagggtgtagccgccgcccatgcggttgcaggtgttgctgaccgacaggcggccatctgcgaagtccagggtgaccggcttgtcttcgcgggcgaacagcgcgtcgatgcgcttgccgtcggcgccggtggcctgctgcagcagccagtgctggctctgcaggcgctgcgcatccaggtgcgccagcgtctgctggtctgctgccttggccgcggccggggccacgtcgtcgccgccgctaccggccggggccggggtctggctgcaggcggccatcagggccagcgggaggagcagggtgagcttgcggttcatggtgattctccttggggaaccgtgggggaaacggggtggggccggcaacggggttaccgtaccccggcgctgttcagctgccggagggcaaccacagcagcagcgccgcgcccagtgcgatgcggtagatcgcgaaggcggtgaacctgtgcgacttgatgtagcccatcagccacttcactacgacgaagccggtgatggccgcggcaaggaaggccacgcccacgtcggcccagtcctcgctgcccagctgcccggccttggccatttccaggaaggtgtaggcgctggcggcgaacatggtgggaatgccgaccaggaacacgaactcggcggcggcggcgcggcggctcaggcccagcagcatggccaggaagatcgccgaggccgagcgcgaggtgccggggaacacgccggccacgacctgtgccaggcccacgccgatcgccaccgtccaggtcacctggtcgcggtcgggcaggcgcgcggtgtaggcctccaccagcagcatccagacaccaccgatgatcaatgcccaggccaccgggctgaccgtctccggcagcgaccagccggccttgcgcactaccaggccgaccacggcggtgaccaggaaggcggcgcccagcttgaacacgtactcacggttctcgcgctggttgaagccggtggccagctgcagcaggcgctggcggaacaccagaaccacggccacgatcgcgccggcctggatgacgatgttgaagaagtccgagcgggcacccagccagtgctgggcgatgagcaggtggccggtgctggagatcggcaggaattcggtcaagccttcgaggatgcccagcagcagggcggagagcaggtcggacatggacggtgcgtgacgcgcggcggaaggaagaaggtcgagaggatagacgatccctgccgcaccaaacgggtgcgtctggtggcgggtgcacccgtttggtgcgcaccgttctgcaccgccacggagcgccctttttgaaatcaatgacttgcggccagcgaaaagttggcacggtcgttgctgtacctcagcaggcattcatccccatccgaggtcgtaccgatgtccgtggaaaacgttgagaagctgatcaaggacaaccagatcgagttcgtcgatctgcgtttcgtggatatgcgtggcgtcgagcagcacgtcaccttcccggtcagcattgtcgaaccgtcgctgttcgaagaaggcaagatgttcgacggcagctcgatcgccggctggaagggcatcaacgaatcggacatggtcctgctgcccgacaccaccagcgcctacgtcgacccgttctacgcagatccgaccatcgtgatcagctgcgacatcctcgatccggccaccatgcagccgtacggccgctgcccgcgcggcatcgccaagcgcgccgaggcctacctgaagtcctccggcatcgccgaaaccgcgttcttcggcccggagccggagttcttcatcttcgactcggtccgtttcgccaatgaaatgggcaacaccttcttcaaggtcgattccgaagaagccgcctggaacagcggcgccaagtacgacggcgccaacagcggctaccgtccgggcgtgaagggcggctacttccccgtgccgccgaccgacaccctgcacgacctgcgcgccgagatgtgcaagaccctggaacaggtcggcatcgaagtggaagtgcagcaccacgaagtggccaccgccggccagtgcgagatcggcaccaagttcagcaccctggtgcagaaggccgatgaactgctgcgcatgaagtacgtgatcaagaacgtcgcgcaccgcaacggcaagaccgtcaccttcatgcccaagccgatcgtgggcgacaacggcagcggcatgcacgtgcatcagtcgctgtccaagggcggcaccaacctgttctccggtgacggctacggtggcctgagccagctggcgctgtggtacatcggcggcatcttcaagcacgccaaggccatcaatgccttcgccaactcgggcaccaacagctacaagcgcctggtgccgggcttcgaggcgccggtgatgctggcctactcggcccgcaaccgttcggcgtcgtgccgcattccgtgggtgtccaacccgaaggcgcgccgcatcgaaatgcgcttcccggacccgatccagtccggctacctgaccttcaccgcactgatgatggccggcctggacggcatcaagaaccagatcgacccgggtgcaccgagcgacaaggacctgtacgacctgccgccggaggaagagaagctgatcccgcaggtctgctcctcgctggaccaggcgctggaagcgctggacaaggaccgcgagttcctgaaggccggcggcgtgatgagcgatgacttcatcgacggctacatcgcgctgaagatgcaggaagtgaccaagttccgcgcggccacccacccgctggaataccagctgtactacgccagctgaccggatgcgatggcggtgggttccccctcccacccgccgccatcgcttccgttttcgcggctggggagccgcggtcagatcggggtcggatcccgttcgtttacgaatgggcgctgatccctatccaggggcaagagagagaccggatacgcgaccagggccgccctccctcccgcgtcggtcgtgcaaggagagaggcacggccgtcccggccctgtacgtgtccggtgcaacagccacggtcatcatcctgatgacccgtggttgcctgatgccaacgcgcgctggcgcgctggccccatccaccctcgggacatgcgcatgaaactgatctccgccatcatccgaccgttcaagctcgacgaggtccgcgaggccctgtccgatgcaggcgtgtcgggcatcaccgtgaccgaagtgaaaggtttcggtcgccagaagggccacaccgagctgtatcgcggcgccgagtacgtcgtcgatttcctgcccaagatcaagatcgaaacggtggtcaccgacgagcgtgccgacgcggtgatcgaagcgatccagtcgtcggcaggcaccggcaagatcggtgacggcaagattttcgtcaccgccgtcgaacaggtcatccgcatccgcaccggcgaaatcggtgccgacgcgctgtaacccccttccggagattccccccatgaagatgcgccttctcaccgggtggcaagcccggttccatctggtgtgcctgttgatgctgctcagcgcactggccgccggtgcctggccgggcagcgcccatgcccaggcccaggtatcgccgttgccgagcgaaagcgtggcggtcgagccgctgcacgatgcggccgccaccgccgcggcgccggccgtggccgaagcggccgccgcctatgatcgtggcgacgtcgcctggatgctcacctcgaccctgctggtgctgttgatggtggtaccgggcctggccctgttctacggcggcctggtgcgttcgaagaatgtgctgtcggtgctcagccagatcctggtggtgttctcgctggtgctgctgctgtgggtggcctatggctacagcgcggtgttcagcgccggcaatccgttcttcggctcgttcaccgaattcgccttcctcaagggcttcaccccggagtcggtgggcaacacgccgatcaagggcctgccggactatctgttcgtcgcgttccagtcgacctttgccggcatcaccaccgcgctgatcgtcggtgccttcgccgagcgcatcaagttccgcgcggtgctgctgttctcggcgctgtggttcaccctcagctacatcccgatggcacatatcgtctggggtggcggctacctgggtgagctgggtgccatcgacttcgccggcggtaccgtggtccacatcaacgcgggcgtcgccggcctggtcggcgcgtggttcgtcggcaagcgcctgggctatggccagaccgcgctgaagccgcacaatgtgccgtttacctacatcggcgcgatgctgctgtgggtgggctggttcggcttcaacgccggctcggcagcagcggccgacaccgtggcctcgctggccttcctcaacaccgtgctggccaccgccgctgccgtgcttggctggaccctggtggaggcgatcggcaagggcaagccgtcggcgctgggcgctgcgtcgggtgcggtggccggtctggtcggcatcaccccggcctgtggcaccgtcgggccgcttggcgcgatcgtgatcggttttgtcgccggcgtggtctgcgtgtggggcgtgaccggcctgaagcgcctgctgaaggtggacgacaccgccgacgtgttcggtgtgcatggtgtcggcggcatcgtcggcgcgatcctcaccggcgtgttcagtgcgcagtcgctgggcggcacaaaggccgatctggatatcgcccatcaggtctgggtgcaggtggtcagcgtcggcctgaccgtggtgtggtcggcggtgatgaccgcggtcatcctgctggtggtcaaggtcgtggtcggcctgcgggtgaccgaagaggccgaacgcaccggcctggatgtgacttcgcacggcgagtccgcctacgaggcctgacgtggcggcgcactgacgtggtgggtgccgaccgttggtcggcacttccactgtccttgttctggtaggtgccaagcttgcttggcacggggtctgggtctgctctggtgggtgccgaccgttggtcggcacagcgggtagcccatccacgcatggcgtggctctaccgttcctgctccaatggctgtctgcaggtgggcgtgtacacgcctccaacgacctcgatggactacagaacggagtaggcgtgatccaggcgacttccgcagcagtgatggaagacatcgaatggtatgtctacctgctgaccctggacgactacagtccgcatgcgctggtgcgtagtgtggccggcgcaggagatcgagaacactggagcttcgctgtggagctcacctgtcgctgcctttcctccggtctgtggcgactctcctacggcctgcctccggagctggggctttccagcatcgatcgtcgatccgagcaccagcagtctgatcaacatcacggtgcctggagcacatgcattggatccgggctttgtgatccgacaggtgcttccggatggattcggtggattctcagtctcaaccagaggctggggtacgggttcgcgtccaatgttcaactcgaattggtgggccaagtgtggagttccaatacgcgcgatactggtggcgaagttggcaagttgcggtggccttggagtacttttccctcaaggcagaaatgcatgagctaccggggctctgatggaaagatggtggagatctgccagtgagtgagcgtgagttgggggcaaagattgtgtctgtgattgccagctccgtgcttggagcggctctattcataggcattccgctgagttctcggataggcagcttttcgcaggctgcaattttcacatcgctggtttgcgccatagccgctgtgtcgggcctcatcttcggtgtgcccggggttatgcttgtggacaagtttcttccgcggttcaaagctcgttatgttgtagctgcaccaatctgtgccttgttggcgtggctcgcgttcgagggtgccttctctcctggcgcttggataaaggtctggaccagtccttccttttggtttgggtgggctcccaggcgcgctggcatcatgcttttcatcgggttggccgtgggtgccttctacatgttgatctggccgcggattggacgaatgatgaaggtcaacacggccttgtgactgagggcgatagaatcgggtgcctgtgcgcagcaaggtggcggcggcaaatagccaggcatacagcggcgcggggaagtagggggcatcgatgagtacaaccgtgcactgaacgcagtgacgacggcgctggtgggcggtgtggcgggacagggcgctggccaggccgcgtccaatgcactggcgccctatgccgctcacttcatcggcagcacgcttgacccgaaccacggcagcgaccccaatgcgactctgcaactgctgtcgcatacggtgttgggtgcgctgctggcggaagccgatggtggcagtgcgggaaccggagccgtgtccgcggccggcggcgagttggccgcgaaggtactgactaatacattgaccggcggagacccctccaagctgagcccggagcagaaagagatggtgctggcgttgtcgcaggcagttggcgcactggcgggcggcctgtcggagcaaaagaaggtcacgaaatgagtgctagtgatgtgaaagatgctggaagaatttccgttcaggctgcatatgtattgatgtgcgtgttccttcagaagtatatggagaggggggaggggcaggacactcttgttgatctgttatcttcgggagggtcatttctatgggcgaatggcttgcccaacgatccggcaatgtgggatgactggtgtgatgcatttgcagaggttgtcaccgtggggagtgctcttaattctgaattttgtagcgcacaaattaattcgtcgggcgagtacttggcgttgctggatgcgttctcggtaatgatggtattccttgagtcgatttttgaccgatctggtgaggatcttccgctgttcgaagttgttgttcgccttatgtcgcctctaggtgattccggttttcttgatgattcctctgtctgggctgagtgggtggagtcggttaggaaggtgagggcatagggttctgggcggttgcttgttcaatggaagttggggttaaacggccgcctcgatgaagttgctcggcttgacggtgttgccagtctgtatgtcaccggtcgaagcagtggtgacgcgccaaggtagatttcttcgcaatgcgggcgcggagggattgaccagatcggccactggcgggatctgaggggccgttgatgaatcattttgtttaagttgttatgacggttgttcctgggttcacgtgtccacggtgttggaatggattcggcggcatggctgggtccgtttcgaggattgaaggtaggtgatgaggaacttgggcgtttggctattcgaattggagtttgagatttgggcatgaggtgggggcgttattgagttttttgcatgacagctccccagttctccagcgatccggacgaagcgaagaaccacggctgcagtcatggttacaattcgtccatgatcagcccccgccttctggcttccacactgctggccctggccctttcggcctgcaccgccaccgcgcctgtgcagcacaacccgctcgccacctggctcccatcacccaaccagaacgcgcgcaccccggtcatcatcgtcatccaccacaccgagcagaaatcggtgcagcagagcctgcatacgttgcgcacggccaacagcggtgggccggtcagtgcgcactacctgatcggcgccgatggccatcgttaccagctggtggctgatgagcgccgtgcctggcacgccggcgccgggcgctggggcaccatcaccgatctcaattcggcttcgatcggtatcgagctcgacaacgatggccgcagtccgttcagtgcggcacagatcgaatcgctgatcgtgctgctgcgcgatctcaccacgcgcctgaacatcccgccgcgccaggtgatcggccatgccgacctggcgccgacgcgcaagcaggatccgagccgcttcttcccatggcagcagttggccgaggccggtttcggcgtgtggccgcgcgcggccgacggcgcggcaccggaaggtttcgacgcgtggaatgccctggcccgcttcggctatccgctggacaaccgcgaagccaccgtcgccgccttccaccgccgtttccgtggccgcgacgacctgccgaagacgctggatgccgaggacgcccgcatcctgcactcgctgctgctgcagacgccgtgactccgcgcatgaacgcttggccccgcgctgggttgccgcccagcggccggcccgccaccatggcggcatgatcgattccgccaccttcttcaagcgcaagcactggaccctgctggcggcggccgtgctcgccggttgcgccaccaccgctccccgcacgggctccgaagcgcccacgccgacctcgccgccggcggccacctacgccaaggtcgactggaaagccctgccagcggtctcggacagcgatctgcaggccggcttcgtggcctggcgcagcagctgcgcccgcctgaaaaacgacgctgtctgggccaagccctgcgccaccgccgcagcggtgtcagacaagaacccggccgcgatccgccagttcctgcagcgcgacctcgatgcctatgcgctgcgtgccggtggccatcaggccgacggattgatcaccggctactacgagccgatctaccccggcagccttacccgcaccgacaaggcgacggtgccggtctacggcacgccggatgatctggtggtggtgcagctggacagcctctacccggaactgaagggcaagcgcctgcgcgggcgcgtcgaaggcaaggtgctcaagccctatgacgacgccggcaccatcgcggccaagggcgccaaggcgccggtgctggcctggctgaccgatccgatggacctgcagttgctgcagatccaggggtccggccgcgtgcgcctggccgatggcaagcaggtacggctggcctatgcggaacagaacggccacccctaccgcgcgatcggtcgctggctggtggaccagggtgttggcgcgcacttaaaactgacccaggctgcgcgttgaactttgacccacccggtgtacggggctgagggtatcagttggtggtctgggtggtggcctcctttgccctgattctggctttggtcttgttggcggcggtgctgttgcgcagccgccaggagtcgttgccggtctccaggatgtggcagtggtgggtgatgcgatccagcagcgcggtggtcatcttggcgtcgccgaacacctgaccccattcggagaaggccaagttggtggtgatggcgaggctggtgcgctcgtagagcttgctgatcaggtggaacagcagcgcgccgcctgagggggtgaacggcaggtagcccagttcatcgaggatgaccaggtcggcataggtcaggcgcagggcgatctgcccggccttgccctgggcctgttccttctccagcgcattgaccagttcgatggtggagaagaagcgcacgcgcaggcgatgctggcgcacggcctggatgccgatggcggtggccaggtgggtcttgccggtgcccggtccaccgacaaggacgacgttctcgggggtgtggatgaagtcaccctggtggagtcgttcgaccagtgcgcgatcaacgggactggccgcgaagtcgaacccgagcaggtcacgatggacggggaaacgtgcggccttcatctggttggcctgggcacgaacctgccgttcggcggactcggcctgcagcagttcggccatccagtgttcgggctccatggtgtgcaggcgcatcttggccagcagttcgggccactggctggccatgccgtgcagcttgagctgctgcatgcgcagcggcaggtcaggcgtcgacatgatctgcctcccgcagggcgtcgtagcgggccggatcggacaccggcggatgacgcagcgtcactcgcgaggcgaccgtctcgatcgtgcggtccggatgctgcaatcgccccagcacgttgagcacgtggtcggcgcgcaccaggccggactcgagtgccagttccaccgccaccagtaccgcttcgagcccgtgcacgggtacggcggccagcacctgggccatggcgcggtcgccgtgaggctggcgcagcaacacctgctgcagcttgcgcagcggatcgggcatggacaggaacggcgcgccgtcacgcagtgcccccggcttgcgctggaccagggcgatgtagtgctgccagtcgtagtggacccgatcacgctcgaagctgcgccggtggcgggcgacctcggcctcgccgaccaccacggccagttcgaagggatacacgcgcaggctggcgacggcgtgggcgtgttcgcacggcacgctgtagcggttgcgctggaagctgaccagcgcggtcgaactgacccgcaccggccgctcgatgtagccgtcgaagggcgcgggcatcggcatcaggtggggctgttcgtcctccagagcttcggccacggtgatgtcggaggcatccggatgcgcctgcatcggccaagcggcgcggcactcgctggcgagccaggcgttgagggtgtccagatctggccagtggcgggccccggcctcgatccagatctgtcggcgccggtcctgcacgttcttctcgacccgccccttctcccaacccgcggcgcggttgcagaactccgcggcgaacaggtagtggctgatcatggcgtggaagcgggcgttgacccgccgttcccggtgctggccgatcccgtccaccgccgtcttcatgttgtcgtagatgccgcggcgcggcacgccaccgaaggcggtaaacgcctgggtatgagcatcgaacagcatctcgtggctctgggtgggataggccaccaaccagaaggcgcggctgcaggccagcttcacgtgggcgagatccagcggcatcttggcgtggctgccgacgaaggcgtactcgcggctccagtcgaactggaaggcttcacccggaggaaagtgcaacggcacgaaggccgggcggcggctggcgccgccggccgccttccactggcggatgaaggccgtcacccgggtgtaggtgcccggatagccgatcgcctgcaactgcgagaacagcaccttggcggtgcgttgttcccgccggggacgatggctgtcggcacgcagccacgtctccaactgggaccggtagggatcgagccgggagggcgaggctcgcctgggatagaccggctcggactggccgctgcgcagccatcgccggatggtattgcgggataggcccgtgcgcttggcgatctcgcgcagcggcaggccatcgcggaaatgcatccgccggatcttggccaacatgaccatggtgatcactcctgaaatcccccgagcaaaagatgctcaggatgtgggcttcaggtgggtcagttttacccgcgcatcaccgccgaaagtgggtcagttctggatgcgcgccaacagcagcacgcacctgatgaacggcatcaccgcccggctgcaggattacggcagcatcggccagcccaagctgagcatcatccacagcctgggccagaccacccacgtctacgccaactggggccgcaccttccaggtgctgaccgggtccaccgcaccggcctacctcaccccggggcaggcgccgatgcagccgtccaccaatacgggcatggagctgggcctgaagttccagccgttccagggcgcccaggcgcgcctggcggtgtggcagcaggacgcggaaaacgaggtatccaacatgcctgccaccggcaccacggtcaccctgggcaagacccgccggcgcggcgtggatgcgcagttgagcctgcagctgggcgatgactggacggtatgggcgtcgcacgcctaccaggaagcgaagatcacccgcgacgaccgcgatgccggcatttccctgcacggccgcgaagtggccgccaccccgcgccacatcagcaatctgggtgtggactaccgcgccagcgacgcgctgcgcctcggcctgcaggcacgcgcgcagggcgactactaccttgaggagcgcaacgtggccggcaagttcggtggcttcgccgtgctcgacctcagtgctgcctatcagctcaccccgcgtttcagcgtggacctgcaactgaagaacgtcaccggccgccagtacgcctacgcctggtacgacagcttcttctgggacagcgcccgcccgatgttctcgccggcgccgggccgcagcgtattcgtcggcctcaacatgaagctgtagccggccacgcatctggcaatggtcgagcttgctcgacctgcagcaggggtcagatccctttccgccaggaaagggctctgaccccgaaccccgcgttttgcactacattggtgcaatgtccgactccgcacccccgccgtcccttgatgccctgggcacgccgctggcctgggccggggccgatggctgcattgccggctgcaatccggccttcgcccgctggctgggcgtcagcgtccggcgcctgctgggtcggccattggccgcactggaagtgcagggcgaggcacttgcccatttcctggcccgcgatgagcgcgacagcctgcgcctgaaccggctggcgctggcggtgcccggcgaggcgccgcgcttcgccgagggctggatgagccgccgcgacgatggtggctggctgctggaggcgcatccggtcgatgaattccccgggctggacccaacccaggcgctgcccagcgcgctcagcgcggcgctgaagggcctggcccacgagctgcgcaacccgctggccgggctgaagggcgcggcccagctgctggcccgccgcgcggcgcagcgcgacgccagcgaacgtgagctgatcgaactgatcggctcggagatcgagcgcctcaacggccttctcgaccagctgctgtcgccggccccggccgcgccgcatgcggaactgaacatccatgccgcgctggaacgtgtgctgcgcctggccgagaacgaggccggctgggcggtacgcctgcagcgcgactacgaccccagcattcccgaattccacggcgacgccgaccgcctcacccaggcggtgtggaacctggtgcgcaacgcgatccaggccggtgccggcagcatcaccctgcgcacccgcgtggagcatggggtgcgtatcgccgagcagctgcacacgttggccttgcgcctggaaatcgccgacgacggccgtggcgtgcccgaggagctggccgaacacctgttcctgccgctggtcagtggccgtgccgaaggcaccgggctgggcctggcactggcccagcaggtcgcgcgcgagcatcgcggcacgctcacctaccgctcgcgtccgggccataccgtgttcaccctgctgttgccgatcggcaacggcgccgctcctgccgaggaggccccgcgcgatgtctgagtcccccaccaccgcacagcgcatctgggtggtcgacgatgatcgtgcggtgcgcttcgtactgtgcaccgcgctgcgcgaggcggggtaccaggtcgttgatttcgacagtgccgctcccgccctgcaggcgttgagcgcgggcccgccaccggcgctgctgttcaccgatgtgcgcatgcccggcgacgatggcctggtactgctggacaagctcaaggccgcgttgccgcagctgccggtggtggtgatgtcggcctataccgatgtcgccagcaccgccggtgcgttccgcgggggcgcgcatgaattcctgtccaagccgttcgacctggacgatgccgtggcgctggcgcaacgtgtgctgccggccgtggcgcccgcgctggccgcccccagccccgccgccgaaacgcccggcgaccagccgccgcaattggtgggcgataccccgccgatgcgtgcgctgttccgcgccatcggtcgcctggcgcaggcaccgctggcggtgctgatcaccggcgagaccggcaccggcaaggagctggtggccaatgcgctgcaccgcgaatcgccgcgtgcgcagggcccgttcgtcgcgctcaataccgccgcgatcccggccgaactgctggagagcgagctgttcggccacgaagctggcgccttcaccggtgcgcagcgccgtcatgtcggccgcttcgagcaggccaacggcggcacgctgttcctggatgagatcggcgacatgccgttgccgctgcagacccgcctgctgcgtgtgctggcgcagggtgagttcttccgcgtcggtggccgcgagctgatccgcgtcgatgtgcgcgtggtggccgccacccaccaggatctggaaggcctggtcgcgcagggcaagttccgcgccgatctgctgcatcgcctggacgtggtgcgcctgcagttgccgccgctgcgtgagcgccgcgaggacatcgcgcaactggccagcacgttcctggccgccgccgcacgcaggctggatacgccgccgaagcgcctcaccgccgcggctctgcaggcgctgcgcgaacacgactggccgggcaacgtgcgcgaactggagaacgtgtgctggcggatggccgcgctggccgccgccgacaccatcggcgtggccgatgtcgataccgcgctgaaccgcgcgcgcggccgccgcaacagcgccagcgcagccgatccgggccaatgggaagcgctgctggccgaatgggcgcgccgtcagctggccgaaggcgtggaagggctgcacgcgcaggtgcgcgagcgggtcgaccatgccctgctggaggcagcgctgcagatcacccacggtcgccgcgccgaagccgctgcccgcctcggcctcggccgcaatacccttacccgcaagctgggcgccgggcgccgtcgcgggggccattgaacggtccctgcacgcgatcctcgcgcccgcttgccgaaccgttgatcgttcatggacgatgcaatgcttagtgtcacctgcaaggagtcttcgatgcgtctgtcctttgccatcctgccgttgtccgccgccgtgctgctgtctgcctgtggcagcgcgccgaagaaggccgagcccaccccgccgccgcccaccgtggtcagcgcagcgaagcagggtgaagccaatctgtcgccggcctcggccagcatcgtcagtggccgcatcgcactgatggtggagcccggcggtatccacatcaccggcctgatcggtggcctgcagccgatgcagcaggccggtttccacatccacgagcgcggcgactgcagcgcggtggatgccagcagcgccggcaaccacttcaaccccggtggcgccgcgcatggccgcgccggcaccggcaagcaccacctgggcgacatggacaacctgcgtgccgatgcccagggccgcgccaacgtcgatatccacctcaagggcgttacccttggcggaggcgccgccaccgatatcgccggacgtgcactggtcgtgcatgccaacgccgacgactatcgcagccagcccgccggcaatgccggcgtccgcatcgcctgtggcgtgatccgggtcgtccgctgatcactgcaggcaacatccagggagagattccaatgcgtctgatccacacttcgctgtttgcggccatcgccgcgctgggcctggcggcctgtaaccagcaaccggccgcgccgcaggcggaaaccccgccggccgccccggccgagggcgccaccaccgaaccggccgcaacgccagccccggcggctgcaccggctgccgatgcctcggccaccgccgaactggcaccgacccagggcaacgaaaccaagggcagcgtcaccttcaaggtggtcgacggcaaggtccacgtgaccggccagatcaccggcctgaagccgggcagcgagcacggcttccacatccacgagaagggcgactgcagcgcgccggacggcatgagcgccggcggccacttcaacccgggcaagcaggatcacggcaacgtcgccaccgatccccaccacggcggcgacatgcccaacatcaaggccgacgacaagggcgtggccaccatcgacggcccggtgtcgagcaatgtcaacatcggcaagggtgatgacttcgacatcatcggccgcggcctgatcgtccacgccgatgcggacgactacaagacccagccgaccggcaacgccggcgcacgcctggcgtgtgcggtgatccagaaggccccgtaagaatcaaggaacgccggcgcaagccggcgtttttcattatcggtagtgccggccgctggccggcaatcgcagatccggacgttgccggccagcggccggcactactcgtcttcagcgcgccagcagttcgcgcgcgtcctgcccggcctcgcagtgcacgaacagcactgcggccctttctgctggaaacggaaaacgccggcgcaagccggcgttcttcattatcggtagtgccggccgctggccggcaatcgcagatccggacgttgccggccagcggccggcactacccgtcttcagcgcgccagcagctcgcgcgcgtcctgcccggcctcgcagtgcacgaacagcactgcggccctttatgctggaaacggaaaatgccggcgcaagccggcgttcttctttatcggtagtgccggccgctggccggcaatcgcacatccggaggttgccggccagcggccggcactacccgccttcagcgcgccagcagctcgcgcgcgtcctgcccggcctcgcagtgcacgaacagcaccggcacgccgtgcgcttccagcaccgcggccatctgccgctggcgcatcaggaactgctcgtagatgccctgcaggcggtcgcaatcgttcttgctgtggttgtagtacgcgcaccaaccggccggatcgaacagcgccatgcgtgcctcgccatgggtatagcgcagcagcggctcgggcgcggcattgagccactcgtcttcgcccggcgccatgatcgcggtctcgatcagcggccacagcgccgccaagccctggttgtcgtactgcatcgacatcatcgcggccaggtcgttcacggtgaaatagcgcgcgtgttcgatgcgggcaccgaagctgttctgtgccatcaacgcggtgtcggcatgcgccatgccgttggccagcagtgtttcttccagcgcattggccaccgcgttggtggtggccacgtcgctgccggtcagcaggaacggcaccacgcgcaggccgccccccaccagggtcgcatcggcctggaacggcagcggcacatcgcctgcggcatcggtgccgaaggccagcaggcgcgggccctggttgcggcccggggcacgcatctgcagttcttccaggcggcgatggatcggccagcccgggcgcagtacttcggccgggtcgaaatgggcggccgcgaacaccaggtccagctcggccacctgcggcaccagcttggaaaggtcacggccgacgcgttcggccagttcaccggcctgttcagcgctgagcaccgcctggcgggggatttcgccgccggccagttccagggccagcacgccaagggcattcatcgcggggtcgggtttgctcatggttccacggttggcccatcacagggcggcagctacacttggctccattatgcctgctccgccgtgcaggccatgttgcagacaccctcatccatgccaggtatctccatgcccaacgctcgtcccgtcgccatcctcggtggcgtccgcattccgttctgccgccagaacaccgcgtattcggatgtcggcaacctcggcatgtcggtccgtacgctgggcgcgctggtcgaacgtttcggcctgcacggccagcagctgggcgaagtggcgatgggtgcggtgatcaagcactccagcgactggaacctgggccgtgaggccacgctgtcctccggcctgtcgccgctgaccccgggcatcaccctgcagcgcgcctgcggcacttcgctggacagcatcatcaccgtggccaacaagatcgcgctgggccagatcgaatcgggcatcggtggcggttctgacaccacgtccgacgtgccgatcgtctacggcaagaagctgcgtgcacgcctgctggccgccaaccgcgccaagagcaccggcgacaagatccgcgcgctcaccgccggcttcaagttctccgagctcaagcccgagttcccgggcgtggccgagccgcgcaccggcaagagcatgggcgaccactgcgaggacatggccaaggaatggaacatctcgcgcgactcgcaggatgagtgggcggtgtcctcgcacaagaagctggccgccgcctatgagcgtggcttcttcaacgacctgatcgcaccgttccgtggcgtcgagcgtgacaacatcctgcgcccggatacctcgctggaaaagctggccacgctgaagccggcgttcgacaaggtttccggccgtggcacgctgaccgctgccaattccaccccgctgaccgacggtgccgctgcggtactgctggccagcgaagagtgggcgcgcgcgcacggccatgagccgcaggcctacctgcgcgacgcgcatgtctctgcggtggacttcgtgcatggcgaaggcctgctgatggcgccgaccatcgcggtgccggagatgctcaagcgcaatggcctgaccctgcaggacttcgacatctacgagatccacgaagccttcgccgcgcaggtgctgtgcaccctgcgtgcgtgggagagcgaggattactgccgcaaccgcctggggctggacgcaccgctgggccgcatcgacccggacaagatcaacctgctgggttcgtcgctggccaccggtcatccgttcgccgccaccggcgcccgcgtcatcgccaccgccgccaagcagctggccgaacgcggcggtggccgcgcgctggtgtcgatctgcaccgccggcggcatgggcgtggtggcgatcgtcgaacgctgatcgctgcgaccgcgcgccaaccaaggttggcgactaccagaaatgcgtgctggatctgctgtggtagatgccgaccttggtcggccgtgaaacggcatcgcttggaagaggccacgcgccaaccagggttggcgactaccgggtcccgcagatgaaaacgccgcccattgggcggcgttttttgctcctgtgggtgccgaccgttggtcggcccacttcagcagcggtcacggcaaccgcggattaccgaattcgtcgcgctcttcgttggcgtcatacaccggcggctgcaccgcgagcggctgttcttccaccgtggcacgcagtggcgtctcgccgccgcgcaccagcgccacgctgtcctcgccgcgctgcaggcgcagcgcattggccaggcactgcgcggccagcgcgtgttcgccacgctgggcgaacagttcacccagcgcttcccacgccggtgcaccggcgccggcggcgatggcctcgtgcaggaacgcatcggcggcctcccactgctgctgggccagggccacgcggccctgcgccaggcgcaacgcggccgagccgtcatgcacgttgcgccaacgtgcgaggttggcctggcgggtagccaggcgctcggccggcagtcggccgtacagcgccaccagttcgtcatcccagcgctggtccagggcctgttccagcgccagcagcgccggctcgtcccagtccagcgccaccgcgcggctggcataggcgccaaccacgtccggagtcggtcgcagtgccttcggcgtggcttcccactgcgcggccagcgcgttgacgtcggccgcttccagcagcgcctgtgcagccaggcgtgcttccagttcactattggcctcggccggcagcaccttgctctggcgcagtgcacccagctggccatacgcctcgtgggcgcggccggcctgtgccagtgcctcggtgcgcagccacaggccgcgtggcggcagcggctggatcgccgctacgtccaatgcgttgatcgcatccaccggcagatcgcgcgccagcagctgttcggcgcgcagcagcgcctgcagggtggcatcactttcgcccaggcgctgcagcagcgcctcgccagccgggccgtcggcacgtgcctgcgcgctgcgcacggcgttggccagcgccaccgcgctcacttccggatccttggcggcaccgtccagcagtttctcggcacgctgccagtggccgtgctcataggcctgcaggccgtcgatcaggcgcacccggccctgtttgcggcggtagcggccccaggcgcggaacggtgcggcgatcaggctccacagcagccatagcaccagcaccgcgatcactgccagcagcgccaccttcggcaggttgctgtggtagtcgtagccgccgtagcgcagggtcacttcgccgaagcggttcaggtcatcggcgccgagccattgcgcagcgaccacgccgatggccacggccagcaacagcacgaccagggattgcaggggtttcatgcgggcttacctccggtcggtctgggtgcgcagttgttgcagggtgctgccaaggacagcgtcgttggcctgcagcggcagttcgcgcaaggccttcagttcagcacgttgcgcgcgcagggctggtgaatccggccagcgccgctgtgcccagtgctccacgcggtccaatgcggtattgcgccccgcgcggtcgccgcgctcgattgccgcacgtgccaatgtcagttccagctgcagcgcgtcgtcggcattgcgctgttcggcggcggtcagcgggccgttctggcggctcggggtgatgtccacgaacggcgccagagctgcctgccaccagggtttggcggtgctgctgccggtcgtgcccgtgatctgcgaaggcaggccctgcagtgccctgcccacagcatccaggcgctgcagcgactgcacgcgggggccgctgccgagcgcatccagtgcctcgcgctcctgcaccagcgcctgacgcaggttcaggccatcactgtcgggcagttcggccagtgccgtcgcggcctgggcgtacaaccggcgtgcgccttccacatcgtcggcgtagttcaggcgctgcgcggcctgggtcagcagcagttcggcctcatcgcgctgtaccgcctggcggccctggttggcgctgtcggccagcttggccaggttctcttccagcaatgcgctgcgctgggaaaggcccagcatctcgtcgcgcagcacgcggttggtggcggccgcgtcctgcaggcgctggctggtcgcgcgctggtcacgacgcagcgcatccagcgtggcctccaggcccttcagctggacagccgtggtctgtgcctgcgctgcctgttcgttctgttgctgttgccagacataccagccggcatagccgcccacgccgagcacgaccacaccggccagcggcagcagccagcgcacgggtcgacggggcggggaaacgggcggagtgtcgttcatcgggcttccttgtcggcaacgtcgccggtcgggggccggcaggccgcgttgtgcacagcatcactgttgccgacgacagcggcaagcgtgacccacgtccctgttcaggtcgctgccgggacggtgagcgtggcgtgtgcggccgccaccagctgcgcgctggtggggcctgccgcgcgcacgacatgctgcaggcccagtgcccgggcctgttcgccgaggcgatcactggccaccacggcagtcgcgtgcgcctgcagacgctgctgcaagggcggcggaagctgctgccagaaatgctgcagcgcttcgccactgctcaccgccagcatccacggctgcgctgaatgcgccaatcgggccagcgcacggggcggcaggtgcagaaggcgacgctggtagatgtcggcacgttcgattgtggcgccggccgcctggagctgcgcggcaatcaggccacgcccgccgggcgcggtcaccaggccgatgcgcaggccctgtacgtcagccagcaccggcagcgccagcaggccttcactgtccatccgctgcggcgcgtgcacctcggtgatgccgtgtgcccgcaatgcgcgcgcggtgccttcgccgacggtcagccacgggctgcgctgggcctcggccagcggcagcagggtggcggccgcggtcacggcggccgggctggtgaacaccacccgatcgcagttcagcgcgcgttgcagctgacgcaccacaggcgtgccatgcaggcgctgcaggcgccagggcgccagggccaggacatccccgcccagcccagcaacggcgcggcgcagcgccacattctggccccgcgggcgcagggagatcagggtccagcgcgcgccggaacgggtggcgccagtgggtatcgtatggtcggccattgcctgcattatgcgggcccttcgttgtcgtggtcgctgctccgatgtccgttgatgccctgacttcctcgttggccgccctgcaggacgtgctggactgcatgccggcggtgcgcgccatgcagatccagctcgacggctatgccgatggcgtgctgcgcatcaccgcgccgctggccgccaacgtcaacgacaagggcaacgccttcggcggcagcctggcctcggtgctgaccctgtccggctgggcgctggtcagcctgcgcctgcgcctggccggccacgatgccgaggtctacgtggccgacagcaacctgcgctacctggccccggtctacgaagacctgcacgcccacgctgaggcggccgaggccaccggctgggatgccttcctgaacaccttccggcagcgccgcaaggcccgcatcagcatcatcgccacccagcccggcgccgatggcaagcccgccgccgaattcagcggtcgcttcgttgccttcgccaaagggtaggatggcaggctgacgttctggggaaaccactgatgcgccgcctgatccagttcctgatctgttccctgctgctggccagtgccgtggcctcggccgacgacctcagccgcaagcagcgcaagctgctggaagagacccagatcgcctacggggcgaccatccgctggggcagcatggacgatgccatcggctacctcgaccccaagctgcgcaaggaaaagccgcccaccgagttcgagctcaaccgttacgcgcagctgcgcgtgtcgtcctaccgcgagcgcagcagtgcctcactggacgggggactggtcgagcggcgggtcgaaatcggggtgatcaaccagaacacccaggccgagcgcacggtggtcgtggtcgagcgctggcgctgggacccggaagccaagcgctggtggcagaccgccggcctgccggacctgtggaaggggcagtgacgggccgcgtccggcttgtgcgacaatcggcgcccgcttaatcgacccgtgacctgagtgaattacgaagagttgctggcctttgcaggccgaaacccgatgctgtccgcggccctggtcggcctgaccgtggccatcatcgtcaccgagatccgccgcctgttccggggcttcaagggcatcaagcccgccgaactgacccagctgatcaacgcgggcggcacggtggtggtcgacctgtcggccagcggtgacttcgagaagggccacattgccggcagccgcaacgcccaggccagtgccttcggcccggaccacaagctggtggccaacgccaagcagtcgccggtggtgctggtgtgccgcagcggcaacgcctcggaaaccgccgccaaggcgctgaagaaggccggcttcgagaaggtctacgtgctcgacggcggcattcccgcctggcagcaggccgagctgccgctggtcaagggccgcaactgattgccgcaggtggcggatccggccttgtatgggcctgatcccgcccccatcgcagtaattcgaccatcgttttcattgcattcattggagttactggaaatgtccgaagagatcaccaacggcgctgctgcgccggtcgatgccgccaccggccccgctttcaccgtcgagaagatctacgtcaaggacgtctccttcgagtcgccgaacgccccgaccatcttcaatgaccaggtgcagccggagctgcagctgaacctgaaccagcaggtgcagcgcctgggtgagaacgccttcgaagtcgtgctggccgtgaccctgacctgccaggccggtgagcgcaccgcctacgtggccgaagtgaagcaggccggcgtgttcggcctagtcggcctggacccgcagtcgatcgacgtgctgcttggcacccagtgcccgaacatcctgttcccgtacgtgcgccagctgatcagcgacctgatccaggccggcggcttcccgccgttcttcctgcagccgatcaacttcgaaggcctgtacgcagaaaccctgcgccagcgccaggagcagggcgacgcaccgtcgctggctgactccgagccggctggcaacgcctgattcctgccgcgacgtcacggatgagcactcccgctgacaagatcgccgtgctgggcgccggttcctggggaaccgcgctggccagcctgctcgcacggcacggtcatccgaccgtgctgtgggggcgcgacgctgccgtggtcgaggccatcgaccagcgccacgagaacccgcgctacctgccgggcatcccgctgccggacagcctgcgtgccaccaccgacctggcgtcggcggtggaaggcgcggcctggatcctggtggtgaccccgtcgcatgccttcggtgaaaccgtgcgtgcgctggcgccgctgcgtccggccggtgccggcgtggcctgggccaccaagggcttcgaacccggttcgggccgtttcctgcatgaagtggcgcgcgaagtgctgggcgaggacgtgccgctggccgtcgtcaccgggccatcgttcgccaaggaagtaacccagggcctgcccaccgcgatcaccgtgcacggcgacgtgcccgagttcgcgcagacggtggccgaggcgatgcatggcccggcgttccgcgcctacaccggcgacgacatggtcggtgccgagctgggcggtgcgatgaagaacgtgctggcggtggccaccggcgtggccgatggcatgcagctgggcctcaacgcccgtgccggcctgatcacccgcggtctcaatgaaatgctgcgcctggctgcggcgatcggcgccaagccggaaacgctgatgggcctggccggcctgggcgatctggtgctgacctgcaccggcgacctgtcgcgcaaccgtcgcctgggcctggccctgggccgtggccagacgctgcaggatgccgtgcgcgaaatcggccaggtggtcgagtcggtgcagaccgccgacgaagtgatgcgacaggcacgccgccatggcatcgacctgccgatctccgacggcgtgcgtgccgtgctgcacggcgagcagactccggaagaaggcctgcgcgcactgctggcgcgggaacagaaaccggaatacccggacacgctgttcaagtgaatcgaaaaaccccggccacgtgccggggttttttatgtgcgcgagccatccacgcatggcgtggatctactgccgaacccgcttctggtagctgccaaccttggttggcgcccgacggcggcaatcaccgcgcccgtggcggcgcgctggtgttgtccatgtccgagaagatcaaccacggcccgtcgcccacgcgcttcagcgtcagcgtgaacttgccggtgtccccctcgttgctgccgtagcgatacgcaccaatgatgtagcccgtgttgcccttcaccgagtgagccaacgcccgcagccgcaacggactgccgccctggccggcatacgcggccttgatcgcagtacgcccgcgcaccggcggctggttgctctgcagtacaaaaccatcctcggcaaacagcgcagccaatgccctggcatcagccgagcgccacgcccgctcgtaatcgcgcagtacgcgctccagcggtgcgggcagggctgcgcccgggagaggccgtgcaggcatcgcgttttctgcatcgtgggcaattgccggcgatgccatcagcagggcactgcagaagatcttggcgagtcgtgtacggcgcatgcgtccggctccaggcgatgacgggacgctacgaacgcatcctggcacggtgctggttagaatcacgcggctgccgatttgctggatgcagcgcagatcagacaaggacagggaatgaagattcgaatcacagggatggcactgacggtcgcattgctggccgcctgcgggcaggcaccggcacccgatgcagcaccagccgcaccagcaccggccacagaagcacctgcggccacggcaacggtgggcgagaaggcgccatccatcgaagatggcgtggatccctcggtgtgggacaacgaaggcgaaccggaagacccgagtgccggcggcgaactcacctgcgcggacaacccgctggcgacgcatttcttcaccctggtgggcggcaataccgtggacgactgcggccgcaaggacccgaaggtgctggccgcgttcaacgccctgatgaagaacacagccgcagccgaatccgctgacagggagattccatcgctgcgcgaacgcctgttgagcgggcccagcggtcctggtgagctgctggtgctgcagggcgagccgtggtggttctataccgcctgccaagcccacgactgccccggcaccgcgttggcgatgctgtattcgccgacggaggcgaagatggtcggccgtcttaccgcgcgctgtcgtgtgtggtggctgggcgagccgacggcggaacaacgtgcgcagattgaacaacgccagccactgcaggatgccgcgttgaaggaagaaagcgcgctctgcgagtgatgtggtgcccgcctcatccttccggctgcatgcgcgcgctggcctgtgcgttcatggccaggcacgccaggatcagcccttccatcacccggtcgcccacgtactcggcctccgtgccgttctgacgcacgcgctcggccgccagcagcagctccagcgtcacgcgttggccggccagtgcacagtccgcatcggccagcgccatgcagcggcccggcatctgatgacgctctggccagggctggccgtcggcggccgcgcctttgccgatgcggtgaagcgtggcgatgaaggcattcggatcggtcgcagccgcgtgctctggcggcccaccgccagtggcggatgagcgatgcggatgcaggcgtgggaagtccggtgatgtcatggcagtgccccgtgcaggacagacggtagccgccacgcaaaggtggcgggcggagacgtggctcgaaaaccgggacagtgcgtacaaggccggcaggcacaaggcctccacgctccgcccgccatagtcggcagacgaattgcccgccggcgccacactgggtgacgccgacgggcaggcgcatacaacgtacgcattgccacgggttttcgaggcccggccacctttttccggtggcacgccatctgtaccgccgtcgctgcgcaacgccaatcagacgagttgcaaacagcgttcgatcaaagacgctttcagcattcttgcatgctgttaagtcgtcgcagacgcaggcgccgcaacggccgtagcagcatggggaatatgcgacatggttcgaacttgatgacagggatatgggtaccccaccaagccgatgacgacagtgcggagcgaagaacgtaaatcgaactcgccccactctggttgtcagcgctcttggggtctttcgtaccaggcctgagtacggttgacgatgcgcaccacggacagcatgaccggcacctcgatcagcacgcccaccaccgtcgccagcgccgccccggaatgcacgccgaacagtcccaccgcagtcgccaccgccagttcgaagaagttgctggcaccaataagcgctgacgggccggccacgcaatgtgccacgcccagccgacggttgagcaagtaggccaggcccgaggtgaaatagacctggatcaggatcggcacggcaattagcgcgattaccagcggttgcttcacgatctgctggccctggaacccgaacagcaccaccagcgtcagcagcagcgcggacagggacagcggccccaaccttcgaagcgtgagttgcaggcccgcctcgccgctgcgcaaaaggatccagtgccgcagcagtgcagcagccagcaccggcaccacgatgtagagaccaacggacagcaacagcgtatcccacggtacggtgatcgccgacaggccgagcagcagtgcaaccaccggcgcgtaggcaaccaccatgatcgcgtcgttcaacgccacctggctcagggtgaagttggcatcaccgcggcacaggttgctccacacgaacaccatggcggtgcagggtgcggctgccagcaggatcagcccggcgatgtagctgtcgatctgtgctgcgggcaaccagtcggcgaaggcatggcgcaggaacagccagcccagcagcgccatcgagaacggcttgaccgcccagttgatgaacagcgtcaccccgatacccttccagtgctgctgcagctggcgcatcgcgcggaagtcgaccttcagcagcatcgggatgatcatcagccagatcagcaccgcaaccggcagattgaccttggccacttcggcggacgccagcaccgcgaaggcaccgggcaggacgtggcccagcagcgtgcccatcgcaatgcacagcacaacccacagcgtcaggtgtcgctcgaacagactcatggcagtggcaccgtcactgcgcgccgtcggtcggcaacagctggccgatccggtccagcgcgtgctgcagcgcttcgcgttcggaccacaccgattcgggcagtgcgagcagcgcacccaggcgggttttcacgatcgcatgggccagcgcgaaggctgcggccttgtcggcatcgctgcctgccacggcggccggatcgggcaggccccaatggctgcggatgaagtcaccgaacaccactgggcaagcttcggcagcggccgcatcacacacggtgatgaccaggtccatgggcgctgcatccacgaactcgtcccatgatttgctgcgcagcccttcaacgggcattccttcggcatgcagttgtgccagcgcgaacggattgacctggccggtgggctggctgcccgcactgaatgccctgaagcgatcgctgtcccaggcgcgcagggtggcttcagccagcacgctgcgcgcgctgttgccggtgcagaggaacaggacattgcgggtcatgtggcaatcgcttcgatggggtgggtcgtgtgcggtatcagcacttgcaggcgggttcggcggggacgcactggttgctgggtgagcccgcgcaacagttgtgcgtgaggtactcgatcaagccgttcatggcatcgaagttggcgcggtagcagacgttgcggccctggttctcgctctccaccagcccggcctgcaccagctccttcaggtggaagctgagcgtggctgggggcacctgcagggccgtagcgatgtcgcccgccatgcgccctgccgggccggcctccaccagcaggcggaaggcagccaggcgggtggcatgaccgagggcggtcagggcggagattgcattcgatgtttccatatttctagaataatcgaatgaatgagccaatcacaagcctggacctgcccaacctggtggaatcgtcattgccccagcccaatcatcaccagctcgccgcggcagatctggggccgccgcgcatcctcctgctctacggctcgctgcggccccggtcgttcagccgcaagctggcgctggaagccgagcgactgctgcgccacctggggtgcgaaacccgggtgttcgacccgcatgcgctgccgatgctggacagcgtggacccgcaccaccctgaagtgcagcgactgcgcgaatggtcgcagtggtcggaaggccaggtatgggtcagccccgagcggcatggcacggtcaccggcgtgttcaagaaccagatcgactggttgccgctggaagatggcagcgtgcggcccacgcagggcaggacgctggcggtgatgcaggtgagcggcggctcgcagtcgttcaacacggtcaacgcgttgcgcgtgcttggtcgttggatgcgcatgctgaccatccccaaccagtcgtcggtggccaaggcctggcaggaattcgatgacgacggccggatgaagccctcgccgtactacgatcgggtggtggatgtgatggaagagctggtgaagttcacgctgctgacgcggggccggtcggactacctggtagaccgttacagcgagcggaagggcgacgcgcacgccgcggcattggcgcgggctgcagaggctacggcttcctgatcctcattggtgccgatgtgaggcacgctcacccaagcagcctcttcacccttgaagctgcaaggcggatgatcaccacataggccagcaacatgccggtgccgatgcccattacttcgatttcccagttgcggcggtagggagaagggcccatgaaggcccacgccagaagcaccgccgcaatcagcaaggcgctgcgattggccttcgaaatgagcgcatcttcggtcgcgtgccccatgttcggatcccaggaaccgagcagccaccccaagccacgcaggtagtcgcgcgccacgaagaacaggaagacgaatacgcctcccatcgtgctcagcagaaactggaagagtgggtccaccggcggcctcatggacgaggcagacattgcctcgcaggatcgtctacgggcgcagtatgccagcgtgccgggcctcgggggcaccacgcctcacacgcaggcgactctccatgagcagactgtgcatcgcagccgcccggcgggcggcatgtgcccacaacgcccagggcggacgcacaaacgcactactcgccagcgtgctgtgcggtcttcttttggttgccatctgtgacggcacggctctgcgcgaactccgggaacgtcttcgcgatcgaatccttgtccggcaggatgtagaacacaccgcccttctcgaacgtggactgcacgatctgctcgtagaacgcgggcgagacattgatgcagccgtgggtgacgcggttgtcgtccggcgagggcgatgccaaccgctcggcgcgcttttccttcgggctgcccggcggcagcgggtgcatcgacacggcggaatcgtagtccacccacagcacgcgtccggcatcgtcggacgggccgtaaccgccaatgaagcggccggcaggcgtggtgcggtcgtggccgggaatcgcgctcagtgcgagcttggcgacgcccggtgcggaatggtcgccgatcgccgacccaaacagcgccggtgcggcgccgcgcagcttgccgtcaccgccgaagaccagaacctgcgccgccgccttgtccatgaccgcaaacggatagccctggttgtccttgctggcgaccacccagccggccagctcgatcactgtctcggacacgctctggtcgggcggaagttcatcaacggcggcgaccgatggtgcaggtgcgtccttgtccctggcgttggctacgccgctgcacgcaacggccagtgccatggccagggaggcatggagggcgcggcgtgcaggagagggggaagtacgaatgggacggctccttgcaatgcaatcgtgggtggaaggatgccagtggccggcgaaggccactgggtccccgatacacccgatacagaggtggatcaattcaaaaggtgagggagcgattacccgcgcggcttgcggccggcaggtgccctttcaagctgctgcacgcgaccttcgatctggtccaggcgctgattggcctgctgtgcggactggttggcggactccgcgctctgcgcagcgccctgcaccttgacgtcgagctgatcgagacgcgagttgatggtggcaaactcgttcttgtatgacgcgcaggcgccaaggctgacggtggcgatgagcgctacagcaagtgcgcgggccgtcttcatgtgttgcgggttcaggttcattgcactccctccttcgtctggggaagctggaatatagcggcgtttgttcccgccgctaccaagcgctttcagctggaatttgaatacgtggaagcactgtgaagccggcccctgacccagcattaacaagcgggatcaggcgagctgatctacgtcggcggcgtgccttgtgcctgttcaaggtcgccaattcatcagtatgaagcggctctcacagcacttgcgtttccacgcctttggcagcagtgcaggcaggcgtccatccactcgcctcgaacacggtcgcggcggtgtcgggccgcacatccagcagcgtggcgatggccctggtcctgtctggcgcgcgggaaacatagctgcgcgcgatgcggtagccgacccagtatccgagatctccacgtcgtgcttcatcgccggggccgttgtacagccacttcgaaagatcggtgcccccactgtcctgtacgaacgcgcgctccagcgcacattcgcggccctgggcccagcgacgcagatgcgcgttggccggttgccccgagatcagttcacccacgtactcggcgccgccttcaagcaacgtctgatagagcagggtgggctgctctacgtccacgcgtgcaccgggctgttgcacgtgcacatactcatgcgcgatcagatgcacgaagcggtcacctacatcggcctgcatccagtcggcgttgcacagtgcttccagtccgatcaccacaccatcttcggtggtgacgccgccgctgttaccccgcccgaccagcacggtgaccggaggaaaacgtgcagtggggagcagcgtgcccaaccgatcgagtgcgtcggcaacccgcgcgcggatcgccggcaatgccgctgcacaggtccgcgccctggcgaacaacgccggcttgtcctggatggccctggccaaacgttccattgatccgatgcggctgtcggtgaagctgcgcaatgcctccgtgccggtgtccagatagccgcgctgcaggtcttcggcactgggttttcctccagtggcatccagcacgctgaagaaacgcgtgacatcgtctgtctgtaccacgatgcgtgcagaaggtcgggcgcgctcggccgcgttggctggcagctgcatcatcggcagggcgacgaggagcagcacccgcaccgcgtggcgcgcatggggcggaaacagcagtgatgcgacggacgcgtgtagccacgtgcccatagttagagcgcgttttggcctcatagttgggtgcagccgaggctctacattcaccgactattagcactttggccccatagtcggggcgctcgtagcgtagctaattgatatcgaaggaaatgattgcatagttggagacttctttcatagctgaaccaactatgggtacgcgaatgaatatccgctctccagaccgtgcagtctgctggcgtctgccacctacctggattccgatgcaaggttgtgaagacgtggctgaacctagtgaggcagcacggatctcggatggacgcaacgcgcaatgcaagaagtcgctaatcaatgtggcatggacccacaaatgaaaagccactgttagttccactcgcgcaatgggctccaatctagcattcgactcgtccggagaacgctcgacgtactaaggcttcaaggattgtaatggattgattttaaaggaggtataaccatttatggcttgcgaaatgcagagggactcaacgagcttgcaacgagcattggtttgcgtatgttggaggaatgaacgcactttccctgcaaagagcggcacttgaagcgtcctcagaagaggaactggcagacaggatcgttgatgagtctgggatctgtgttcgcgtgggggatgccaggcagctacttggattccgtagcctagatgcaggtagacgagctgcagtgcaggggcgcttaggcatcgaagcggtgaactttccaggtcgccgtggacgtttgtcccttcggcaggcacctatcaaggagcccgtgcaatgagctaagtaagaaagatctctggggagaagaaacaacaaaccctggctggcaggccagggcttgttcgcagctagcgcttagttccgcgtagctgaatctactcccgacccgtgcttctttcaagtgctcgtcaaagcgggagggggccgtgcagccatctcccaccatgagggagatggcaatgaccccagatcagctgagggatcatctaagaacgctagatctatcagtagaagataggtccttcgcactcgagctctttggccaggaaccagggcgcagcgttggcgcctatgcactggacaatgtggtcgtcgacttctattcaagaaagtgtcgcgatgttcgcaggctggaaagccatacagtcgagcaaacatttgcatatgagctagaaattgatcctgacgtcatctcatatgtttgccaggtcacttgtcgtggcataaggcgcggcaatcatgtgtgcaccgcccatgcagacttctttgtggttcgacggtcctccgtggaaatcgtggaatgtaagcccatctccaagctcagcactcttgtggagagaaagcccgaagagtgggtgctggacggtgggaaatatcgcaatctggtgtatgagcgatgggcagcatcccatgggatcgagtacaagatctgggcctcacccagcaacatcagccgataccataggaacttgcagttcatctaccaaaactgggatgaagatctctcaatggtgcgccgagagggctttgctgcggtggaaaagcagctttacatggggccaaaaagcatcgcgtttcttatggaagagatcccttggttcaacgctggggttgacctgccccctttctcagggccactagctacttagtagagtccaggttggggagcataccgctccggtgggtcaggtttcgatcagcggtcgaaccagtcaaggcaccttcgttgcgcagcgcggcggcgaactcggcaggcgtgcatttgggcagtgagctgtgcggacgcacctcgttgtagtccttgcgccagatggcgattaccgcccgtgcgtgctcgagcgagataaaccagttttcgttcaagcattcgtcccggaacttgccgttgaagctctccacataggcgttctgcgtgggtttccctggctgggtcagcacaagcgtcacgccgttggcggtcgcccactggtccagcgcccggccggtaaactcgggtccctggtcggtcctgatcgccgcggggtagccgcggaaacggcataccgcatccaggatgtcggccacgttctggccatttatcctccggccgacggcgatttccaccgcttccttggtgcaatcgtccaccaccgtcaggcacttgatcgggcgcccgttggccagggcgtcgaagacgaagtccatcgaccaggtgtggttgggccccgacggcagctgcagcggacggcgctcgacggccacgcgatcgcgcttgcggcgcttgcgcaccgccaggccagcgttgcggtacagccggtagattcgcttgtggttggcgatccagccctcccgttccagcaggatgtgcagccgtcggtagccgaaccggcgacgttcgcccgccaacgcaacgagcctggcctgcaacggcgcgttcgccatgcgcggctggtagtgcaacacgctgcgtgacaagcccagtgcccggcaggcccgccgctccgacaggcccagcttcgcccgcacgtccgcgacggcagcccgtcgcgtcggcgggctcagtattttccccgcgccacgatcctcagcgcttcgttgtccaacatcgactcggccaacagctttttgagccgcgcgttctccgcttccagtgccttcaggcgcttggcgtcgggcacatccatgccgccgaacttgcgccgccacaggtagaacgacgcgtcactgaagccgtgcttgcggcaaagctccttgaccggcgtgccggcggccgcctgcttcaggaagccgatgatctgctcttcggtgtatcgcttcttcatgtccgtcctcttgtgagacggactctactaagatcaggttggcccggaaaacggggggcaggtcagcggagtcattggctcacattggctaaagggtaaggttgcgacgctagccgatctgtatcgtgagctagccctgcagtgcgagtgcgctggcgttcctgtgcctggccggaaggcgctcgtcagaagagttcgatccgtttcaagggggcaacgtgatcttgctgtcggcggtaagcgaaactatcaagcaaataggccgcgttccgacgctcgggttagatcaggccaagcgcttgctgtgcactctgtcctgcacatcgatgcaaccaaggttgacaaccgagtctttacacaagaagacgaagggcagcaagaccactgcccggtactgtactgcggccgtgacgaagcgtcgtctaaggttatggcccatgcctttgtcttcggtcccgctcggcgcgaagggccactaattttgctgaggaactatgtgcgcgagcacgcgaagcttccacacgcaatcgtgatcgatcgaggcactgatctgaagtcagccttaggtgatctctgtcgaacctatggcatctccatactcacagtgccgacaggcgcgagtcgcttcaactcacagtgtgagacggttcaagggcttatcaattccatggtcagccacaaattgattgggagcacaaagccagataaagccggtagaagtgtcgatggaaaattcaaaagcagatcgaccgcgcgcctagatttctcgaccgtagaatccgaaattcaccaccttctgtacagcctgatgcccgagatgcccgtggatggcttcgcaggtgcgcgagagcgatttgagaacagtcagttgactgctccaaactctggaataccaacggttgtagacgatgacttcctatttcaaacttcagtgaaattgaaatcatgctcttatgaaagaacaagggggatcagacactggaggagaagctacacgaacgcggatctcgcgtcgcgcgcgcatgaagagaagatcctcagtgctcggcgtgatcctgaggatatttcattcgtttggattcagaccacgaagagacgctacaaggcatggtgctcgaaggtctcggagattggtcactactccgagcaggatcgtcacttcgaggcaatgtgggagcagttcatcacgccggatgttgagagcaagaaggaggagctgcagcgtaagaactatgagaggacgagcatggccaacgccaggcagcgagccaatgatatggggctagcaagtggaaaggaaacgcaagccccgccaaatgcgagtcgatcgaaggttcaagcgagattggtcgtcaactttgatgagctccccgatctcattgtggaaggggattcgcatggacgctagcatcctgccccattttccagctgatgagatgagcttccctttcataccacatcagcgctttctaactacccagcacagcctactgaaaccagtttcaagagctcggccaggagactttgtttggttgatagcgccctcctggtcaggaaagagcgagttgcgtcggcagctgttgcctgagctcggaggaaatccccaactttggccaacaggccacttgccgctgatctccgtaagggcaatcctgaatcagggcgacaagttcaatccgaaagacttcgctttgcgcctacatcaggaaataactgagcccgacactagctggactaatgctatggaaaccggtggcgatcctgaccaaacgcacgtggccgcagagcggcgagcctcttcagtgttctggcgtgaagtgcgcgcgagaacagcggagagagaccttcgtctttcgtttgagcgcatgtctagaattcgcggattgaggtacatcgtcatagaggaggctgcgaacatctgcagggttccgaagagtcagagttcacgcaactacatgcttggcatcatggcgcttgttgaagaaattggttgtgtggcgatcatgataggaacccatgaagcgtccacgctctatgaggattcccaagaggtgttcaatagatctgacgttctctatatgcgtccgtacggtctgaatgacaatgacgacctgcgatcctacgcctctctgatcaaggcgatcggcaagggatttccactttcaaaaggtagccttctccaggaaaacctagagctcattgctctcaatggaggaggaatttttggcccaactctgcggtacttgatgcgggcgaatgaagagcgttgtcgcaatggttccaataccatcgagctcgggcatctgcgagcagcgtctggaaccgaaaggaatcacaggctgctctggggagagatagacgcgttcaatagacttgccgatggcaagcgttctctacgcctagcggacttcttgaccatcaagggctcattgcctagcgaaggcgatctgtgaggatggaaccaccaagatggacggtacttccacctcttgagcttcgtgatgcaggtactccctggacagagtcgctcaatggatacgcaaatcgcttggctaagctcagcggaatttcgtggtgcaagatgcttcagcttatcgacacccactcgtcggaggtgccgtctagatacattgatcagcgcagactcgatgggctcgggcctgtgtcagtacggcgtgcgcgttcactagagaagctgactgggcagtcacttgtcggtgctactttgtatggactctcagagatcgtctcctcaagggcagcgagctggagtcgacacgccgcttggtgtccgatttgcatcggagctagcgatatggacgagagcgccacagagaggctgatttggagcttcgatgcttattctcactgctcgctgcacgacgccaggattgagaacagctgttccaattgtggactcgggaagttgaagagcattgcattgagaaagtgcccatcctgcggagatcgcctagacaggcgcacacgctttgactcggcgaacccgactcagcgctggatcaatcagtgcatagaggaactgatctcttggtgctcaaatcatccaaatcagaggcttgaactctcgaacttggaggtgtttatagaggcagtcgtggctagaggcgaggggcgaaagttggattaccgacctcctgcacgcttgcctgcaagctattctgactacaagagctggactagagtgaattgcttcagactctttagaaggaatgatccgagtcgattagagttcaatgagctactcaatctatcggcaaatcagtgcgtttctgtcttggacattcttctccagcctatcgaatctgcgtccgaacttctgcctggaattggatcgaatccggagctcccactaggacgcggtcgagtggcagatgagcgaagagagtttgctcgattgattgacgctctgcttggtgatgaccagtgcgtccttccatccttccaggtgcttgcgcagctgagcggaagacgagggtcgttcaagtctggcctaccgcaccaccacgctcactatgcggtccggctaaggcggcaacagatgatgattcgcggtgtttcgcgaagaacgataaacagagcatttcgtcttgcatgtcagttgaaactttcgctacaaggacagctgctgatatccgaagccgtggcaaaacgaatccacatcgagatggatgtcgcatcgaacatcgtgcgatccgcggaacttgcctgtagccttcttctcccagtgggagggatgaagggcgtagctcgtatacccaatctatgagctgaagccttcctggtggtcttagaagtctcttggtcttagatgccccgtctgcctgacgaacacgagtgcattccacggttgcgaggtgtcagcaatagtgccgaagggtggcataagtgctgtttgctacgtcgacggatgcgcagagcatcagagctgtccaagatcttggacgaccgatcgcccttggcgcaggtcgattgccagcaggcgaccacctgcgacctgccggccagcggcgctgtttaaccatgccgcttgaatcctgcccgcctcaattaccgcatccgccgcaaagctgtcaggcatggcccgcaagggctcgccgggtgacgccagacctccgaccaagggttgcaccaccgttgctgcggtgctgttggacttggcgtaggcggtggctatcattcgtccggcgcgtgggcaccaccctccaagtaccagttcggtgcctagggtttgcctcgacaggcctgcttcaagggctgccttctcgtactcaggccaaagctggtcgatcaccaatgtcagttccttggctagctgctccattgtgaagtccgcccgaaagctggcctgcagcataagtgcgtagatccgaaggaagaattgagtgctaccgcggcaggcaagcaccacgttgtgttgtggaatcaataagaacttcgcgccggacgatttggcgccggtgagtgcatcctcggcgagagtgtcaactgcaaccagcatccgttcagggctaagcaggacgttcaggatactcaagtgcgcgcgctccactggcttgcggcaatatcatgcggattgtgacgattgtccatctagaagcacattggaatgaattttgagatttctgacttaaaggctcgcttagaggcgtgcgagacagatcttgcggcgcaccgtggctacttgaaggccctggagtacggggtgcggacgctaatcatcacgcatccgtatccagacttgttatcgagagcctgggcctcgattcttcctgggatcactgaggctcacgggccggagggcgggtggattttcaacgcggccttccagcagctgctctcggtgttgactcagcaaattgaggcgcggggcggcaaggtcggtgattaggggaacaggacctcgatctgaggtggcattgcctcccagcccagagcagggctttctggacggttcagggcgggacttggggaacttcagggcgggacttggggaactcaagcacgaatgctggagggaactgatgtgcagctttgaggggaagggggattggcgtgcgtataaagaagggcagatgaggagaacttcaaatgagtgacgtagatgaatggctgacaagggcctcggctgccactcggccctgcggcaatgagcaggccactgatgtgctagttcagcgcttgtcccaagaagcttccccttcgcaatgggccggtaagcgagagttccgccgggcactcgcatgcgccgcgctcgcggcggtgcttacctgcggaggagtaggctccgccttctttgtcacccaggcaccctcgcgcccgacatgggtcgcggccccagcttccatgtccccatacgctctactggtggaacgctgatggcaatcggacccctcatgaggctgccgctggcaacaatcgctggcgccatcattggcgtcgtgtgcgcgctggctatcggctggacctggcactcgctcaatcctgggcacagcgatctccatgaacgccttcacgccgtggtgcctctggacgactcggagaagcagatcctccaggccaaggaacagctgttcgcaacaaggcgaggtgagatcgaagcgcgcctgcggattgccaaccgccagctggcggacgccatcgcggctgaccccaaatggaacccccaggtggaacgtgcaagtcgtgaggtggagcgggctgcgggcgatctccagcgcatcacgctcgagcatgtgttcgagatgcgcgagggcttgaaacccgagcaccggccggcctacgacaaggcactccttgaagcacttcgcaccgactctccctgagccacacaaacgttgtgaccatcgaggacgacaacaactgggcagttgaagctgcggcaggtaatgctgaggccttcgctcgcctggtccgccgtcactcgccagcaatcaagcagatggttcgaggcatgggcctgcccgaaaccgacgtcgatgatgtcgtgcaggagacattcgttgccgcttggcgaggcctgtcagagtacgatccgacgcgctcggtacttccctggctgatgcgtattggaatcaacaaggttcgtgatacgcaacggtttcgacgcgtccgccatttcctgttccgggccaagcctttggatgacgaggaaggacgcgccctgcattccgagcaggccgggccagagcaggttgccggctctcagcttgagctcgcagaagtaagaagggttctcaacacgatcgacccgagcctgcgtgaagccctggttctgactgccttcgtcggcctttcccaggttgaagcagcttccgccctgggtatcagtctcaaaacaatagagggtcgcgtactgagagcacgggccaagctgacagatgcactgagccgcgggaaataaattttcgccggattcgaggggaaggccgcgcaggccgcgtagtgcagaaagacggccgagattgcggccccactgcaccggatcctcatgaaaccatcattgcttgccctgacggtgatgctggccctgaccagtatctctgcggcctatgcctcggacgccccgaacttcagcgcgttgctcgagcagagcagggcccaatcccccttccttcaggaaaaggggttcgacacagctgccgctgcgggcgaagcccgccaagcgcgagcgctacgtaaccccaccattgatgccctcgcagagaatctcaacgctccccccagcaatggcgcgagccagcggcagacgacctacaccatcagccagccactcgagatctttggccaacgtggggctcgaatccaggcgggagagaaagggctgcaggcggccgaagctcgccagcaccaggcacaagtcgaattcgccgcagccttggctgttgcctacgcgtcttccgaggctgggctgatacggcgaaacattgctgccgaagatgttgatcgcgccagaggcgacctgaaggcagctcaggcgctggttgacgcaggaaaggaggccagcctgcgcgtagcacaagcccaggccggcttgagctcagcagaagcgattgccgcctcaagagaggcagaggcggctgcagctctcgagcaactgtcagtactggcgggaagagctgaaccctactcaggcacgtccgagtcactcctggtgcgcgagtgggttgcgcccgcaattgcgaacgtcgattcggcatctgtcctgtctgcgaaggcagacgtcgatgcgagcgatgcggttctgcgcactgaacgcttcaagcgggcaccggaccttaacctcaccgcaggccgtcgcaacttcgccgccggtggggacgcattggtcgtcggcgtgtctctgagcatcccattgtttgaccggaacagcggcgggatcagcgcggctcgagcacggagcgacgccgcccgtgctcgattggatgcagcacgcctccagagccaggcggaccgtgcgactgcgcttgcgcgtgttgacgccgccaagcgaggactgatcgctgcctccaagggagaggaagcagccacggaagcctaccgaatggcgcgcttgggatacgaggccggtagaaccccactggttgagctgctgcttagccgtcgcacgctgacggacgcgaggctgagcgtggtggatgcacgactcgcacgcgttgccgcctacgcatcgctcgccgtggccagcggtcagattgcctttggagacatgtagatgaagagaagtattccggctgttaacaccctgacgatgatcggcgtggctaccttggcgcttggcgcgggatttggcattgcacgcttatccgccccttcagagacggtggtcgaccccgcgaaagacgaagccagcgccagtgcgccggcggaggcggaggcagctcaggaagtcgcgattcccaaggagtatcttgccgctgccgggatctcggtggagcccgtcacttccgctcaggtagcggcgaatatcaccgcatcgggttcggtcgtggcaatccccggtggtgaggccgtcgtggtggcacgtgcggccggtaacgtcaccgatgtcatccggcaggtgggcgacaaggtgaagaagggcgaagtgctggcacgcgtagccagccctgatggggcccgtattgcggctgaccttcgtgtggccagcgccagcctctccctcgccgaaaagaacgtcaagcgcgatgagtcgttgctcgcacagggcgtgctggcacgacaagaggctgaggcgagtcgcgccgcctatctcacagcgcaagcagaagcacaacgcgctgccctggtggcacgcaccgccaatgtggatggaggaggtagcgtcaacgtcatcagccctatcgatggaaccatcagcagctcgcaagtgactctgggcgctttcgtcgagccgcaggcctccctttatagggtcacaggttccaatggcgtggagattcaggcctccgttcgtgcgggtgacaccggtcggatcaaggccggcgacagcgtgtccattacccgctccgacggaagcgtcacctcaggaaaggtccgttcagttgctgccgccgtaggtgggctgacaagggctgccacagtcgtaatcaccccgagcgcagaggcgaacggattggttgtgggtgacggtgtgcaggtccggctggtcaccgcttccggatcgggtgaggggctgtctgtctcggaagaggcggtccagaacatcgacggaaaagacgtcctcttcgtcagaaccagtaaggggttcactgcacagccggtcttcattggcctccgtagcggtggtatggcgcagatcctttctggcgtcactgcgggaaccccggttgctacccgtaatgcgtttctggtgaaagccgagatgaaaaagtcgggcggagacgagtaatgatcgagcaagtactcacgggtgccgtacggcaccgctggctggttctgttgatcacactggtgattgcggtgatcggcgggtggcaactgaacctgctaccgatcgacgtgactccggatatcacgaacaagcaggtccagatcaacaccgtcatcccgacgctgagtccagtggaggtcgagaagcgcgttacctacccgatcgagaccgcgatggcaggacttcggggcgtcgcgaacacccggtcgttctcgcgcaacggcttcagccaggtcacggtgatcttcgatgagagcgcagacctctacttcatgcgccaacaggtcaccgagcgtctgactcaggctcggccccagttgccggagggtgccgaaccactgatgggcccggtttcgaccgggttgggcgaagtattccactacagcgttgaattcacccacccagatggcaaagatgccccgcgaaatgatggtaagcctggctggcaaagcgacggttcgttcctgactgatcaaggggaacggctgacggacaacatggcacgtctggcctacttgcgcacagtccaggactggattgtgcggcctcagctgcgcacgacgccaggcgtagcagacgtcgacagcctcggcggctacgtcaaggagtatgtcgttgagcccaatgcgagcaagctcgcggagtacgggttctcctataccgacctggccgacgcgttgcaggatgccaatctgtcggtcggagcagactacatccagaggtcgggcgagtcctatctggtgcgcgcagacgcccgcatccgctccgtggacgagattgcccgtgccgttgtgggcaatcgcaacggagttcccgtaacggtgggtgacgtcgcacgtgtggtcgttgacggtgagctccgccgcggtgctgccagccgcaatggatacgagactgtcgtcggcagtgcactcatgctggttggcgccaacagccgaactgtggcggcggcggtgggtgacaagctgcaggagatcggcaagaccatgccgccgggcgtgacgattgttcccaccttggaccgatcccagctggttgtcgcaacgatcaagaccgtcgccaagaacctggccgaaggcgctcttctagtcgtggtcatcctgtgtgcattgctcggaaactggcgagctgctgtcattgctgcattggtgattccgttgtccctgctgatcaccgcgatcggcatgaacaagctcgggatctctggcaacctgatgagcctgggtgcgctcgactttggcctgatcatcgacggcgcggtcatcatcgtcgagaacgcactgcgccgcctggcagagcgacagcatgcacttgggcgcccgctcaatctatcggagcgcctgcatgaaacgatcgcctcgtccaaggagatggtccgcccgaccgtatatgggcaggcggtcatcttcctggtcttcgtgccctgcctgaccttccagggcgtcgaggggaagatgttctctccgatggtcattaccctgatgctggcgctggcctctgcattcgtgctctccctcactttcgttccggcgatggtggcggtcatgctcaagggccacatttccgagaaggaagtacgggtagtagctgctaccaagagccgctatcagccgatgcttcgcagcgcaatccgccaacccatgccctacctggccggtggtcttggcgtcctggtggccggcgttgtggcctttggctttgtgggtcgggagttcatgcccacattggatgagcagaatctcaacctgtcctccgttcgcatcccgtccacatcgatcgagcagtccgtcgccatcgaccttcctcttgagaaggcactgatgacgttgccggaggtacagacggtgtactccaaggccggtaccgcaagcctggccgcagatcccatgccgcccaatgcgtccgacaactacgtgatcctcaagcccaaggaccaatggccggatggagtgaagaccaaagagcaggtgatcgagaggattcgagaaaagacagcctttcttgttggtaacaactatgacgccacccagcccatcgagatgcgcttcaatgagctgatcggcggcgttcgtagcgacgttgcagtcaagatctatggcgaagacctgacggcgcttgccggcagcgctgacaagattgcggccgtcctcaagaagattccgggcgcatcggatgtccgtgtggcgcagacgggaggcttcccgacctttgacatggcgttcgaccgggccgcgatcgcccgttacggactcaccgtcaaggaagtggccgacacagtgtctgctgctctggcaggtcgcatggcgggccagatcttcgaaggtgatcggcgcttcgacgtggtggttcgtctgccccgtgtggaccgcagcgatctcgatgtactaggagccgttccggttatgctgccgccaggcagtcaggaaggccgtcagtctgttccgcttcgtgaattggtcagtttccgcttcacacagggtctgaacgaagtgagccgcgacaatggcaaacgtcgaatctatgtggaagcgaatgtggtcgggcgtgacctgggtagcttcgttgacgacgccaaggcggctattgcccagcaggtgcagttgcccacgggttcctggatcgaatggggcgggcagttccagaatctgcaggcagcaacgaagcgactggcgattattgtgcctctctgcttcattctcattgcagccgtcctctacatggcgattggcaacggtttgctgacaggtacggtactgactgcggtgccacttgctctggccggtggattcttcgcattggcgttgagaggaatccccttctcgatctcagctgctgtgggcttcatcgcggtatctggtgtcgcggtgctcaacggcctggttctgatctccgcgatcaagaaacgcctgcacgaggggcttccgccagatgaggcggtcgaactgggtgcaatggagcgcgttagaccggttcttatgaccgcgctggttgcctccctgggcttcgtcccgatggcgattgcaacaggtacgggcgccgaagtgcagaagccactggctacagtggttatcgggggtcttgccacggcaaccgtactgacgctgttcgtgctgcctgcgctgtgcgggctggtactccgaagaactgcgcgcaggaaggccgcgggcattgaagaccccttgccggtacccgaagtcgattgagcgcaagccccttccacggcttcacgtcctgccctgcggatcggattacgatccgcagggcagcggcgctttccactgttccatctagaggtgagccatgatcgaggtcctacgctttccaacattcaggaacctgttcgctgcgcaggttatcgcgctgatcggcacgggcttggctaccgtggcgctctctcttttggcctatgacttggcgggggctgaggcgggcgctgtgctaggtacggctctggcaatcaagatgattgtctacgtgctgttggcccctctgtccggagcgatcgtcccggcaaatctacgcaaaccggtgcttattgccctcgacctggtgcgggcgggcgcggcgctttgtctgccgttcgtcaaccagatctggcaggtgtacctgctcattgccttgctgcagtcggcctcggcgtgcttcacccctctgttccagtcgacgatcccggaaatcctgaaggaggaacgcgactacacccgagcactgtccctgtcgcgcctggcctatgacctggagagcctgctgagtcccgcgttggccgctgctctgctgacgctgatcagcttccacggcctgttcgctggtacgtccgtaggcttcgtgatatccgccatcttggtgttctcaactgcattccccttcgttgctccgtccctaagaaaggacggtccctacgcccgcgcgattcgaggaatgcggatctacctgaagacgcccaggctgaaagggttgcttgcccttaatctgtgtgcggccgccggcggcgccatggtgttcgtgaacaccgtcgttgtggtgcgcaacgttctcggcggagcagagtcacaggtggcatgggcgctggcagctttcggtggcggctcgatgctgacggcgcttgtcctccccaaggttctcgatcgggtggctgacaggcgcgtgatgctctcctcagcccttgcaatgtgcatcgtacttgtgaccctcgggcttacctggctgctctcgccctcctccataggttggcccatcgtgctcgccggctgggcattgttggggatgagctatgcggggctggtgactcctggcggcagactgctgcggcgatcagcggaatccaccgatctgccattcctgttcgcagcgcagttctctctctcccacgtgtgttggctgattgcctaccctctggcgggagccgtgggtgcgaagtttggaatgccagtggcgatcatggcactggcagtagtcggcatcgccggattcgtgttcgcctggagaatctggcccgcccatgacccggacgagatctcccacggtcacgacgatctggctgcggaccatccccactgggcggaacacgcttcttccaacggcaagcactcacatcggtatgtcatcgacgacgtgcaccctcgttggcctggatgacggaaacttgaacaaggggcgcgagagggcactttcaccgctcgcgcccgacgttgtcatatcgactttgccagaacaagcctctagtctttgcccgtgcgatcccttcgtctaccaaccagcgtgctgttgcgcagctgcatcttcatgatgctggtggcgagtctgttcgtgcgacccgtcctgaatcatctgggtgagctgcacggcttgcagcacatcgtgcaggctgcggtggaacatggtcacccccatgttggggtgagtgatgccgcagaccgtgatcttgaacacgcggttggattgcacagcctgttgcaccaggccgatctgacggcttctgtaggcatcttggccagccttgctggacccgctcgagttgatctgagcgatatccatccctggcaccagccagcggcagagcttcagcatcatcgctcatccctgttcaggcctcctatcgcctgagacccaggcctcgtgctcgcactgagcagaggcttggcagcgcccgtccagtcaatccttactggacgttcgtcgctgcaagaaattattcattcgttccccgcccggaccccgcttacacgcagtgatccgtgtgacgtgccgtgcgcgccctctgcgcactcgtagcacgttgcgccggttcccagtgtcgtagcggatagctttggcggaggtccgctgaccgcattcgtagatcctcatcatgatccccagttctgaatccggggcgctctcgcgcgtccttctccaacccccactacggtcgcactggccgcgaactctactcgcactgctttccctgttcatgctgctactcacagctgacggggcgttggctcacgcgatcgccgaaggcgacaagggctacatccaggaaatatctggagtaaatctgatcgcattcgcctatctgggcgcaaaacacatggccaccggctatgaccacatcctgttcctcctgggcgtggtgttcttcctgtaccggatgaagcatgtcgcgctgtatgtgacgctgttcgcgatcgggcactccacaacgatgctgctgggtgtgctgttcaacgtgggcatcaacagctacctgatcgacgcgatcattggtctgtctgtggtctacaaggccctggacaatctgggcgcctaccagcgttggttcggcttccagccaaacacaaaggttgcgacgttgatcttcggcctgttccacggctttggtctgtcaaccaagatcatcgagtacgacatctcacccgatggtctgttgcccaacctgctcgcgttcaacgtcggcgtggagatcggccagatcctctcgcttggcgcgattctgatcgcaatgggctactggcgccgcacgcccagcttcttcaagcacgcctacaccgccaatgccgccatgctctgcgccggattcattctgatcggcatgcagctcactggctacttcgtttcctgactttcaagagaactacatcatgtacaacagtaagcccgccgaaggcgacctccccaccagccgccagttgggacgcaccaccgcaattgccgccggcatcgccattgtcctcctggttggagtggtgatgccatctgagtacggaatcgatcccactggtgttggtcgggtactgggcttgaaggaaatgggggagatcaaggaacagcttgccgaggaagcggcagctgacgctgcgatggacgcaaaggccgccgaagacgaggcagccgccctgctgacgcaggtgtccacgcagaaccgtaagaccgttgaagttgctcagaagcctgccgcgagcaatgcggccaccgctgctgaatggcgggacgaagaacaggttgtcctggcgccgggccaaggcaccgagatcaagctcgtcatgaaggcgggcgagcgcgccagctaccagtggtctgttgaaggcggcgtcgtgaacttcgacgcccacggagacggcggcggtcgagcgatcagctatgagaagggtcgaggggaagccaccaagcagggggtgctcctggctgccttcgacggcaaccacggatggttctggcgcaacaggggcgaggagcccgtaacgcttctgctccgcaccggaggggagtacgagttgatcaagaagatgtaaaccgcagcggttagcggtggccgggtgcgcttaaggcccggccaccgccctatgtgcggtatttccgatgggctgcgcccagtttcggccccctcgacaaccccagccagccccgcttaagctaacctatatgcgtctttccgcccgccacggccttgccctcaggatcagcttctttgcgctgatgctgttgagtgtcgttgcgcggccgatggtgatccagctcagcgaactgcacggattggaacatgacatcgcagcagcggtggatcatggccattcacatgccggcggtgcgggcgacaatctggacccggatcacgccactggcgctcatgcggtactgcatcaggcagatgcgagtttcgctggaagcctgttcacgccccacgtctacctggcttcactaccgctggccggtgaagtccatgctctgcgacttctgagggtgcctgcagggcacccggcgtcacccttccgacctccgatcgtctgacgaccctagctgcgctctagcagcctgagcgcgcctcccgtgtagcggaaggcggcgcgtcgttctgactttctttccggaggcttccgtgaaattccgtagtgtgtgggcgctggctgttgccggcgcctgcggtgtggccgttcctggctacgccgccgaagtgctgcgcctggaggatgcggtcgcccgcgctctgggcactcacccaagcgtgcaggcagatgccgcacaaatagaggcgacaaagaaccgtgcggcgcgagagggcttagcagccccgttggtgctcggcggagaactggagaacgtggccggtagtggcagcgtgcgaggtatggacgctgccgaggcaacgttccgggtatccaagattctggaactgggtggcaagcgggcggcccgccaagcgcttggcggcgccgaggtggatgcagccctgcgagaggctgatgtgacccgggtggccatcgccacacgcaccgctggtcgattcatcgacgtgcttgcggcgcaggagcatgtcgagcatgcggaagagcggattcgtatggcccgcgcgcttcagcgagaggtggcccgctgggtctctgcggcacggaacccggattcagacctgagggccgctgaaattgccctggccgatgcagagctcaagcgtgatcaagcagtccagcggttggaggcctcgcgcatggcgcttgcgtcttcctggggctctttcaccgctgacttcgacaccgtcgccggcgatacaaacatcctccctccgctggatgactaccagacgctgtccgaacgccttcagaacgcgccacagcaacgtgccttcgatgcccagtccagagttcttgccgcgcgccgcgatgtcgccgtttccagcgcgaagcctgacgtgagtgttggatttggacttcgccgtcttgaagcaacgaaggacagtggcttggtcatgtcgatctcggttcccttgggaacccggcgtcgatcagcctacttggtatccgaagtcgactacgaactgagtgcgctcaagtcacgccgtgaagcacaaatgttggagctcaaccaggagctgttcggagtctatcaacagctgcgccaagcgcagttggaggtcacctccgttcgtgagcggcagctccccaaggcggagcaggcgatgaatcagagccgtcgtggcttcgaggagggtcgattctcctatctcgcattgagccaggcgcagaagacgctgttcgaccttcgtgagcgcgaagtcgagtccgccgcactctatctccgattgctggtcgaggcagatcgcctcaccgcctccgcccaggatatccgcccatgaatcgttacgcccttcttatgttgcttccgctggcactggccgcctgtggcggtgaaaagccggttgagaaagaagccgcagaatccgccgccgcggccggcgactacgagcgcggccccaaccgcggtcgcatgctccgcgatggtgatttcgcacttgaagtcaccgtctatgaaaccaacacgcctcctcagttccgcctctacgcctatcgaaatgacaagccgatctcaccgaatgaggtgaaggcaacaatgcagttgaagcgcctcgacggtgaggtcaatgatttcactttcaccgccgaaaacgactatctcgtagggaacggcgaggtcgtggaacctcattctttcgacgtgaaggcagacgcagtggtaggaggaaagacacacacctggtcctatcagtcctatgaaggccgtaccaccatcgagccaagcgctgccaaggatgcgggtgtggtggtggaagaggctaccgctggcactatccgcgatacggtcacgctgatgggaaacatcgcggtcaacactggccgccaggccgccgtcaaagcacgattcccaggtattgtccgcagcgtgtcggtcgagatgggccaacgcgtttcggcagggcagacgctggcgacggttgaaggcaatgacagcatgcgcacctacgcggtgattgctcccttcagcggcatcgttcttgcgcgcaacaccagtgttggtgatgtggccggcgacaacacactgttcgacgttgccgatctgtcagaggtctgggtcgatctacgagctctgggcactgacgccgagcgtctcgctccaggtcaagcagtgcggatccgttccgccacgggtgccttggagactgaaggtaggctccaaagcctgcttccgctggcaagcagcggccaaagcgtggttgcgcgcgtgagtatccccaatggtgacggcaagtggcgtccaggaatggctgtctcggccgaggtcatcattgccgagacacctgttccactggccgtcaaagagtcagggctccagcgatttcgcgactttaccgtcgtatttgcgcaggtgggcgatacctatgaggtgcgcatgcttgagcttggaaagcgtgatggcgagtgggcagaggttcttggcggactgaagcccggaacgcggtacgtcgccgagcagagctatctgatccgtgcagacatcgagaagtctggcgccagccacgaccactaaggatccatcatgctagagcgaatcattcgcgcgtccatcgcgcatagatggcttgtgctgcttctggtcctggcgctgtcaggcttgggcatctggaactacagcaagctgccaatcgacgccgtccctgacatcaccaatgtccaggtccagatcaacaccgaagcaccaggctactctccactggaggcagagcagcgggtaacgttccccgtcgagacagccttggccggcttggccaagctggagtacacgcggtccatctcgcgttatggtctctcccaggtcaccgttgtattcgaagacggtaccgacatctacttcgcgcggcagcaggtggccgagcgcttgcagcaagccgcatcccagctcccaactgggctgaagccaacgctgggcccggtcgccaccggtctcggtgagatcttcatgtacaccgtggaagccgagaagggtgctgaagagacctggacgccgatggcgcttcgtaccctccaggattgggtggtacgcccccagatgcgacatctgaaaggtgtgacagaggtcaacaccgtcggtggctatgtgcggcagttccacatcacgcctgacccgcgcaagcttcaggcgtacgagctgaccatgcaggatgtgatggaggccgtggcgcgcagcaatgcgaacgtgggtgccggctacattgaaaagagtggtgaacagtaccttgtacgcgttcctggccaagtggcggacatggacggcctgcgcaagatcgtggtcgccaatcgcgaggggctgccgcttcgcgtcggtgacctcgcagacgttcacgagggcaccgaacttcgaacgggggcagcgaccaaagatggcaaggaagtggtacttggtactgcattcatgctcattggtgagaacagccgcgaagtcgctcagcgaaccgctgccaagctgaaggagatcgacgagacgcttccagaaggtgtccgcgcgcatgcggtctatgaccgtacggagctggtcgaccgcaccattgaaaccgtcaagaagaacctgctggaaggtgccctgctggtcattgcggtgctgttccttctgctcggaaatcttcgcgccgcactgatcacggccgcggtcattcctttgaccatgctgctgaccatctccggcatggtccagaaccgtgtctcagcaaatctgatgagcttgggtgcgctggacttcggtctgatcgtcgacggcgcggtcatcattgttgagaactgtctgcgccgcttcggcgagcgtcagcacgccctggggcgtctgttgacccgggatgagcgctttgctttggccgccagcgccagtgccgaggtgatcaagcccagcttgttcggcttgttcatcattgccgccgtctacatcccgatctttgcgctctccggcgtggaaggaaagatgttccacccgatggccctgaccgtcgttatcgcgctgactggtgcgatggcattgtccctcacgttcgttcccgctgcggttgctcagtttgtcacgggcaaggtctcggagaaggaaaccaaggctatgcggggcgtgaccaagctgtatggcccgatgctggaacgggcagtcagtgctcgcaaactggttgtgggtggtgcagccgttctcaccgtactggcgggtcttctggccagtcgcatgggcactgagttcattccgaatctggacgaaggtgatattgcgcttcacgcgctgcgcattcccggcactagtctgacgcaagccatcggcatgcagcgccagcttgaagcgaccatcaagaagttccccgaggtcgatgaggttgtcgcaaagatcggcacagcagaggtagcgaccgaccccatgccaccgtcggtcgcagacaccttcatcatgctcaaggatcgcgaccaatggcctgatccccgcaagccaaaggcgcagctcattgctgagctggagaaggctgtccgagcaattcccggcaacaactacgagttcacccagcccgtgcagatgcgcatgaacgagctgattgccggtgtacgcgccgaggtggcggtgaagttgtacggtgacgacctggatcagctggcgcagatcggcagccagatcgaggacgccgcaggttccatcccaggcgccgcagacgtgaagttagagcagatcagtggtctgcctcttatgaccatcacgcctgacctggatgctttggcccgctatggcgtttcgatcgacgaggtccagaagaccatctctgttgcgctgggcggtgaggcggtcggtcaggtctttgagggtgatcgtcgcttcgacatcgtcgttcgtctgcccgagaacctgcgtcaggacacccggacgctcgcatcgctaccggtagccgtcgccctcggggccagttccggcgaacagagagcgttcgttccgctggggcagctggctaaagttgaagttgcgccaggcccaaaccaggtcagtcgcgagaacggcaagcgtcgcgtcgtcatcaccagcaatgtacgtggtcgcgaccttggttcgttcgtagaggagctgcgagagaaggttggtcaggaggtgcagttgccggaaggctactggattgagtatggcggtaccttcgagcagctcatctctgccagcaagcggctgtccgtggtcgtgccggtcgtcctggtgatgatcttcggcttgctcttcatggcgttcggctcgggcaaggatgctgccatcgtgttcagcggcgttccacttgcgttgaccggtggcgtggtggctctgtggatgcgtgacatacccctgtccatttctgcaggcgtggggttcatcgcgctgtcgggcgtcgccgtgctcaacggcctggtcatgatcagcttcatcaagagccttagggaacagggcactcccctgcaccaagcggtaaccgaaggtgcactgacccggctgcgccccgtgctgatgacggccctggttgccagcctgggcttcctgccaatggccctaaacgttggggctggcgcggaagttcagcgcccgctggcgacggtcgttatcggcggaatcatctcctccacgctgctgaccttgctggtgttgccggcgctctatcgcctcatccaccgcgaaggggatgagcggaaggaggacgcagcgtgaacccgtccatctcaacccctcccaggaacatgcagttgaccatttccaaacgaacccaagcgtggctctacctgcttgcagccatccttctgccttgcgttgcttgggcgcatggcgtcagtgaaggcgaccaggccttcctggaagacagtaccggcctgcagctcatcgcgttcacgtacctcggcgccaagcacatggtgactggatacgaccacctcctgtttctgttcggggtgatcttcttcttgtaccggatgcgtgatgtcagcatctacgtgacgttgttcgcgatcggccacagcaccaccttgttgctaggtgtcctgggcggattgcatgtgaatgcgtacctggtcgacgcaatcattggcctgtcggttgtctacaaggcgctggacaacatgggcgcgttcaagcgctggtttggggtacagcccaacaccaaagccgccgtgctgatctttggcttcttccatggctttggtctagcgacaaagctgcaggatttctcgctctcacctgacgggcttgtcccaaacatgctcgccttcaacgtgggggtcgagatcggacagctgctcgcgctcgcaggcatcttgatcgtgatgggcttctggcgccgcttgccgtcattccatcgacaggcgtacagcatcaacaccgcccttatgtgcgccggcttcgtgcttgttggcatgcagctcaccggctacttcgtttcctgaatctacagaggtactcatgtccatcacgctttccaatcagctgcccagcactcgcaagctgctgaaatccaccgccctggccgctgccgttgcaggggtgattctgctcaccaccgtgcttcccgcggagtacggaatcgaccctacgggcgtaggcaaggttctgggtctggacgccctagcctccactgaccaggtagaggccgtagctcccccagttccggcatctgctggcagcgccgaagccgtctcggcgctgttcgagaaggccaaggttgccttcgggagcaatggcaagcagaccttcgaacccgccgctgtctctctcgccagcactcctttacggcaggactcactgacgatcgagcttgcccctggtaagggccaggaggtgaaggcccatatggctcagggcgctgggatggttttcagctggaaggccacgtctgatgttgccgtggacatgcacggcgagcgtcccgacgtgaagggcccctggaccagctacgccgttgaaggcgcccagcgtcaggctgagggaacgttcattgctccctttgaaggtacccatgggtggtactggcagaaccgcggcagcacccccgtgatcatcgaggtgcaaattaccggctaccaagccgacctctaccagccgtgacacccggcataacgccgaaatcaacctaggagaagcaacatgaagaatcgttttgccctcatcagcgtccttttcgcttccattgcagcgtccgcatcggccttcgcacatgatccggcgcttcatgccgagtcggaagtgaaggaggcgcctaaggcaaagcctgctacgtgtgaacagctggctgaccggacgaagttcaaggtggatcttgccgatcctcagaccaaggcgctgaaggacaggtgcgacgctcaggcgcagtctgcagccaagaagaagtagtaggctgcaaaggatggtccggattgtgaggggccggaccatccttccccttctaacctatatgcatacgttgagctgacgcgtggattcagggctgtgcaagctgactcaattcggcaaagaaggtatgcatatcttggggtacctctccataggttagattcctggcgacgtcttctctgcttacgcggaattttttaagaacggagtttccgcttatgaatatttctttcccatgcgcatcacggattggtagtgcgatatcgctagctgttggatcagcagggataacaagagcgtgctcggcgaagaaggcggtgacatcgccttgaggtgatccagctgcgcgagctatggcgctcgtgcagaggagatggttctcaatgtgcctacgccgccatttcatggctttgaaatggggttgtttggaagtgaaagacttgtcgataagatcattaccgaccgtcgcatgtggctcatcgtcgcgatcccgaatgctgattgcccgaagaccaggaatctccgccaacagctggaggtagagttgctgcctctcgccggcagatcccgtccagtaccaagggacaacgttcttgggccacgcaaagtttgcttgtttagcgattagctggaggaagcgccaatcgctctcggcttccaagatcagcatacgtctgtgctccatcaaggagtgcagggtaggggtctggatcgtcccaatcccgccaagaaccttgactttgcccacttcctcttggaggtactttgcctttctttctgcgacagccagaattttcccatgatcgtaaaagcgaatcagttcaggagagtgtgtggccatcagtacttgcttgttgcggaggcttgcaacgtgcccgagggacataagcagctccctctgcagggtcgcgttcagatgtgcatccggctcatcgagaagaacgacgtcgacatcgggtgagagtgcgagggcgtacacgctcagccattggaggaagccacttccctccaccataaggtctcttggagtgtatttggggtgtcgcttgaatgtgtcacccttcagttcacccttggcgctctctacacgaaggtagctgtgaaatctctcgttgaaaggaacgaccctcaaatcagtggcaaagatggactgcatcgtgcgtagcaggatctcccaagggtcgttcgagcgcagccatttcagcgaggaatccttcaactttctgctgtttccacgcaggcgttcacgttccctcctgttgtgttcgtgcagatcgaataggacgttgcgaatgactccacccgataggccttggcctatcagacgttctctcatggcaggagtcagtctgccttcacgatcagtgatgccagcgaatggcggtagatatcccactcgcgggacgttgccatcgatcggctcgccctttgcgttgacgatctcagcagctaccagattcgttgaagtggttcgcacaaagagacgatcattggcctgtgacagacctatctccaagtgccgctcctgtttgtcgggcaggtcccaatagacgccaatcttcagtgtatagccgtcgggctcgtcgtccttgctagtcttcagattggtccagagatggctgagcgatggaatttgcatcggcgtgaaatccgcaatacccatgcccaggccagttttgttcttggtttgcagccagctggatcgccctttctcgatctctagcatagtcttgcagaactgccagatagcgagagcttgcagaatcgaggacttgccggagttgtttcctccaacaacaagcgaaaggccttgatcaatctctatctctgtgtcccgaaactgcttaaagcgatgtagcgtgatcttctttatatgcatgtatcccccctagaaatttttcatttccatttgcgacgaagtcaatgctcagccgatttcgttcggcgaattctccgtacccgctaccgtagcaggaggcggaatggaattggagtgacctaggagctggagagaagatgcgctcccttcagtctgacggagtaggacaactgcgcagcaggggtagctggctagaattgtgtccaatgttccaccacgattgccagattctagttggcggcgctctatcgggcagacgaagagagatccttgcatgctgcgcagtgttgagggcagcacattgattgatttggttgacggattcgtctgcatcgccgccatctctcaaaagcaatgggccgatgtgcttgaggtcgttcgcagagccaaaccaatttcgatatcatcagatagtcaagaaaatcacctcaaacggtggcgaggacatgaacgcaattgatcgagatatcctgatcgtcggcttgtttatcgcttcttttgccgtcttctttgtcgggtgggcctgctggctcgctgcgcgtcggcggccttgccggcgatctgagcggaaggtctgagtgagcctcagggctattcacgcctagatcttcttggtctcagtgccgctcgcccaggctactcggggcgtacccctagtcggtgcccgagagtgttcccatagttgggacgccgatgtgttcccatagttggcgttcaagtgcccaactatgggcacgtggctacgtgctgcatgtggagttccctgaacgccagccttatttatacaccagtcagttcaatattcagggtcgattagaccccctaacggataattcacacctgtcgaccgcctcctctctctccccctcccgggaggcggccgacgaaaccaaaataattaaaggtgtgtcccgatgaacaagaattcgctgctcgccctgggtctcctggctgccctgccgttcgctgcatcggcaaccgacggcctgtcgtacaactacgttgaaggcggctacgtgaacaccgatgccaagggcggcgacgccgatggctggaaggtgaagggttccgtggcggtgcacccgaacttccacatcttcggcgactacagcgcgcaggagaccgacaagttcaagaatgacgtcgaccagtggcgcatcggtgccggctacaactacggcatcgcaccgaacaccgacctggtggcccgcgttgcgtaccagaagttcgacatgaagcatggcctggacttcaacggctactcgaccgaagtcggcgtgcgcaccgcgttcaacccgtacgtggaaggctacgtgatggccggctacgaggactacaccaagaagcacggcatcaacccggacggcgagttctacggccgtgtcggcgccaccgccaagttcaaccagaactggggcctgagcggcgaagtgaagctggccaaggccggcgaccgcgagtggttcgtgggcccgcgcttcacctggtaacaaacgcctgtcgttagtgcgtgttgtgctggcgtgtgactctctctctctctcccacacgccaaccgaagcccggcctcgcgccgggcttcacttttatgggccgcgtggcgccacaatgcggcatgggcgacccttcttcctctctcgcaggtactggcacggcctaccaggagcatctggcccccgactcactgcgtggccacttcggccagctgtggcagagccagcttcctgacgatgctgatgggcacatcaccgtgctgcccgatggctgcgtggacatcctctggcgcgatggtgcgctgttcgtcgttggccctgaccgggtagccgcacatccgatgttggcaccgggcgcgcaggtgctgggcgcgcgcttacggcctgggcaggcgctggccgcgctgggcctgccgttggccgagatcatcggccaggccgtgccgttggctgatctgaaggggcgatgggcggtagaggccgcggcctccatcggcgacaccgcacctgcgcagcgcctgctgcggatggcgcactgcctgcagccgcaccttgggggcgcggcgctcgacagccggtcacagcgggcgcacgtcctgttccaggcgcttgccagggggaatgccacgctggatgagcttgcggcacgcctgagcttgagcccgcgcagcctgcggcgcttcagccagctgcagttcggctatggggccaagacacttgagaggatcctgcgcctgcaacgcttcctgcgccacagccgcgcgctgccgcagcactcgttggcgatgctggccgccgaggccggctatgccgaccaagcccatctcagccgtgaggcgcgtgaactggctggcatgaccgcacgcgagctgcgcctggagtggggccactgatggccgtttcgttcaagatcgcagcgccgcgctgaccgaagctggggttccaatcacggagacacctcatgagccacgaagctacccacgatgccgaccgccgcatcgacaacatcgaattcgccgtcgccagcatcgcacgcagcaagcgcttctacggcgaggtgtttggctggcgcttcaccgactatggtccggcctataccgagttcgacgacggccgcctgaaaggtggcttcgtggccgacgcagcggtgcatgcgcacggcggtccgctggtgatcctgtactgcgcggacctggccgacgcacagcagcgcgtggtcgccgccggtggcgaggtggtgcaggcggtgttccccttccccggcggccgccgcttccacttccgcgatctggacggctacgagctggcggtctggagtgatgtggactgaggtcttcgtaccttcgccggtggacggaacgagaaccgctccgtccccggtcaggcggttccgctatgatcgcccgcacatcgccacacgcgatgcgtccgcctcaagccagcaggaaccgccgtgaactcccagcccgcaccgatcaccgccgtcaaccacacgctcgacaacgagccgcagcagatcactgcgccgctcacccattcggcggcgttcctggtgctgaaggtgaaggatgacgaggcgtcgatcgccaaggcgcgcgaggtgctggccagtaccgacgatctgatcaagaacaccgccatccgcgagatcgagcgcaccttcacctgcaacgtggccatcggccatcgcgtgtggcagccgctggtaggctccacgccgccacgcgagctgaagccgttccgcgagatcaagggcgcgacccacaccgccgtgtccacgcccggtgacctgctgtaccacatccgcgcacgcaccatggacctgatcgtggccttcgagcgcaacctgctgatggcgttcggcgatgcggtggaaacggtcgatgatgtcgccggtttccgctacttcgatggccgcgacctgctcgacttcgtcgatggcacggccaatccagaagggctgtcgctgcctgaagccacgatcgtgggtgacgaggacccggagcatgccggcggcagttacgtggtggtgcagaagtacctgcacaacctcgatgcgtggcgcgcgcagaagaccgaggcgcaggaggcgatcatcggccgcaccaagcacgacaacatcgagctggacgacgcgccggccgatgcgcagaaatcgcacaagaccctgtgcaccatcgaggatgccgacggagagcacgagatcctgcgcgacaacatgccgttcgccaacccggggcgtggcgagtacggtacctacttcatcggttacacccgccgcctgtgggtgatcgagaagatgctcgagcgcatgttcatcggcaatcccgcaccgctgcatgaccgcatccttgatttctccaccgccaccaccggcgtgaccttcttcgcaccttcgcgcaaggtgctggccgacctgggcgagtgatcaacgcacgcgtatgcatctggaggacgtatgtctgtcttgagagccccattcctggcggcattgttcatgggcatcgccggctgctcgacagcacctggtctgcttgaacaaacgcccgagtcatttgcttcttcgaaatcggtacagcaggtcaccgtttgcctgtcccagacatggacacaacgcaacaaggtcgtgcgcgtgctgcccaccgaatccgggcagcgcattgtcatcgacaaccctgtgaaccatggggtgattgccattgtcgagcttgcccctgtcccgactggtacgtctgcacgctactggaagggtgcaggcctcaccggctggacacgtgatgatctgaaggcctgcctggactgatcgaaggcaatccctcgcaatcgggcaagctcgaagcgccgggccatcaccggccgccatccgcctgtcatctatggcgccgaccatggcgcgctggatgggagtgcaggaggcaggcgatggtgtcagcaaacaggaccggcctacgccgctggtggcggcgtctggctgcggtgttcggcgcgttggcactggggagtgccagcgtttccgcgcaggaagcccctgcgcactggatggcctacgccgccgccgtgggtggccagctgcagcagcgcctgcagcaggaacaggacccgcaggcgcagcgcgtgctggaatggctgcaggcacacgctgacacgccgacgccgctgccggtgagcgtgtggatcgcggcggatggccgtatttcgaaactggaattcgacagcctgggcgatgcccaggtcgacgccgacctgcgcgcgacgctgcaggccgcgccgttgcaggcggcaccgccggccgacatgcgccaaccgatgcgattgggcctgttgctggagccgaagtagatccatgccatgcgtggatgtggtgggtagatgccgaccttggtcggcaggcgcgcaacaacccaggttggcgactaccggtagcccggccgcgcatggcgtggcgctaccgcgttgccacctgtggctcgcgcgcggcggcgctccatgcgcgcaggccgaacacggccaggccgaggaagaacacgtacagtgccgcggtcacgtgcagcgacttgaacaggtacgcacccacatagaccacgtccaccgcgatccacacccaccagcaggccacgtggcggcgtgcctgccaccactggccgaccaggctcagcgcggtcagcatcgcgtccagccagggcagcgcggcatcggtgaaggtgtgcatggccgcacccagcgccacgccaccgcacaggccgaaggccaggtcgcgcagcagcgtgccgcgtgccagtggcacgatgcggatgctgccctcatcggcggcgtgctgccgccagttgagccagccgtagaccaggaagccaccgaaggcgacctgcagcagggtatccgagtacagcttggcctcggcgaacaccagcccgtacagcgccaccgacagcaggcccaccggccacgccgccagccggcgccgggccatcagccagacgccgaggatgctgcacagtgcggcggtccactccagcatcacgccgctcacagcgcgaacgtcaccgacaggcgggcctgtcgcggtgcgccggggaacaggtagtagtcaccaccgctgctgccggtatcgcgccagtagaagcggttgaacaggttgtccaccgacaggttccaggtcaccgcgcgctcgcgcaggcggtgctggaaacgcaggccggcatcgaacaccgagtagtccggcgcgcgcacgccaccgtcggcgcgtgccacgttggcaccggcatagcgccagccaccggtcacgtccaggccctgcacgaacggcagcgcgtaggccatgtgcacgctggcgcgtaccttcggcacgttcaccagctgatggccttcataggccggcgtgccggtgtcgcgcgcgcgcgcctgcagcacgctggcgctggccacgatctgcagtgtgtcggtcagctggccgttggcggtcagctccaggccggtgtgggtctgcgtgccttcctcgacgaaggtgtagccgacgtcgctgctgtcgggcttggcgtactggtacggctgcgagatgcggaacaccgctgcacccagcgtcagcgcctcgaccggcacgtacttcacgcctgcttccagctgccgtgactgcaccgacggcaggaaagtgtcggcattgctggtccagaacggcgcttcctggcccagcgaaatgccgcgcacgtagctggcataggcgttgagctgatcggtggccttccacaccaccgcggtctgcggtaggaaccgcgacaggcggctgtgccgctgcggaacgccacgcttgtcgtaggcacgctcgtccaggcgcacgaagcggccaccggccaaccactgccagtcatcgccaaagctcatccggtccagcgcgaagaacgcggtctggcggctgtccaggcgtcgtgcggaggggccgggcatcttcggcgacggctcgaacacgggcacctgcgggtcgtggatgttgctggtgccgacgtactcgttgacgctcgggcgcttgtccacggtgcggcggaagtagtcggcaccgagggtcagctgatggccgacgctgccggtctcgaagtggccacgcagctcggcacgggcctgctggttgcggcgggtgtcgtccgggctgcggtagtcgtagacatcgtagtcgccgttgggcgcgaagtagttgcctggcacgctgccatcggcgcactgcacggcgtagtagcagccgtaggcgaaggcgacgttgtcatcgatcaccgagcggctgtggccgaccgagacgcgcgactgccaggcatcgttgaagtcgtaggtatgcagcgcggtgatgttggtgctggcgatatccaccgggcgctgccacggctggtagccgagcaggtgctcgcggtcgacaccgcgcggcaggtcacgcgcgcccagcagctggtagccggacaccgagcgctgcgagctggtctggtagttggcatccacttccagcttgccgcgctcgccgatcagccagtcggcggccagcgagtagaagttgcggcggccatcggcgtgcgcgacgtaggaattgctggagtcccatgcggcattcaggcgcaggccgaaacgcggggtgatccagtggccgacatcgacggcgacgtagcgtgagccttccgaatcggtgccgagcgtggcggtgcgtacttcagccgggcgcttgccgatgtagttgatgatcccgcccggcgccatcacccctgccgccaggccggcttcacccttgaggatctcgaccgactgcacgttctccagcgccaagcgttgctcgccggcgatggacagcccgttgaagcggtagccggtggcggcgtccagcgcgaagccgcggatggcgatgttctggtagtagcccacaggtgcatacgcatcacccagcgaggcatcgttgctggccagctcggacagcgaacgtacctggcgacgttcgagatagtcgcgctcgagcacgttcaccgaagccggcgtgtccttccacgaaccgccgccgaaggcattcacgcgcgaggtatcggccttcggcttgccggcctccacgcgcaccgccgccagttcggtcggcgagcgttcggcaccagtggcagccgcatcggtggtggcctcggcctcgctggcatgcagcggcagcgcggcgcagagggcgagtgagagcagggtggggcgcaggcagcggttcattcggttcgtcttcggacaacaagggagacgaagcgacggcgcgcaggtgcaccggcccatgatgggggtgtggctgcggctcaaagctccctacgccggtgcaaaccggatcaggttccaagggactctctcagcctggcagatccaggcacccccgcttcaggtgaccatttcactacaaatggtacggatttgcgagcgccagccggggtcagatccctttcctgcggaaagggatctgaccgcaacgctgcgtcaaccggatcacgcgacggcgtgcagggcctgcagcagtgcccgtcccggcgcgctgtggaaccacgccggatggcccagcatgaagggctgccaggccacgtcggcattcgcggttgagcgggtgacaccttcgaagtactccacttcggacagtgcgaagtcgaaatggaccattggcagcaggtcggccagcaggtgcacgcgtgccgccgacaacggcagcacctcgcggtagccgtcgagcagggccagcgcgatatcgatgcgcactgcctccctgccgcgctccagttccagccacgccactgcgttgcgctcgatcgcggtggcgaggtcgaacagcgcgctggtgggcgacgccaggccgaaatccagcacggtgctgacctcgccgttgcgccacagcaggttggagacatgccagtcgttgtgcgcccacagccggggctcggcgcgcaggcgctcggccaggccggcgtgccacggcagcacgtcgcgctgcagctgtgcttcccatggaatgcgcgcgagatagcgtgccagcccgggacgttcatccagtcctgccttgatggcggcgatcggatcgtcggcacggatcaggtcgtcgcgcgccaccagcagatgggtgctgcgctggggcgcgtggtagctggcggcggcacggtgcagctgtgcgagcgtgcgccctgcttcgcgggcctgcgcgacatcggtcaacagcgaccacgacaccgcgtcgcgatacaggtcgtcgcccacgccgacatcgtgcagttcaaacgtccattcgccgtgttcgaccgcagtgtggccatcggtggccggcagcacctgcaccactggcacgccggcggcggcgagatgggcgatgaagtggtgttcttcttcaagacaggccgcgctgcgcacgctgtggtggtggcgcttgatgaacaccgcgccgcgcgtgtcgtcgacgatggcggcggcagacagcggccgcgggctgtgccagcgcggttggctgtgcccgcccagctgcgggtaacgcgtactcagccacgcgatgtccgccgcgctgatcggtggccagtcggcagcgacctcgtcgttgttgaggccctgcacgcggtgggaggaagacgtcatgccacagtccgatcgggaaagtcacatccaaggctgcgcattcaacgccatgcgcgtggccaacgcaaacgggcgggtcatcgacccgcccgtctccgcgtcatcggtatgtcggcgctgcttaccagccgcgatggcggccgcggtcgtggtagtagcggttgtcgtagtagcgctcacgctgccagcggcggtcatcgccacggtcgtagtagccactgcggtagtagccacggtcgtaacggcgatcgtagcggtcgtcgtaacggcgattgtcgtagtaacggcggtcgcggcggtcggaggtggtcaggttgccgatcgcgccgccggccacggcaccgccgacggtggccgcagggtcgccgttggacagcaggttgccggccacgccaccgaccacggcgccgaccagggtgcgcttgtccttcctcgacatcgcgctggcatcgctgaccacggcgacaccggcaaccagtgccagggccatcgccagaccacggaagctgagtgtggaagtactgagcatgttcggttctcctgtgaggtgcatgccacgctgggcagggagggcgcggggcgccccggctgccgtggagaccacgctggcgttccaacattgccggaacattgcctggcctaccgggcggcttgcgcattcatctagcgtcaggcggcatgaagcaaggctgaaagtggcttttaccgctcagctggcagaaagggaaagggccgcgcatggcgcggcccctcccggtctgcaaggcgctgcgggctcagacgcccatggccttctgcgcctggcgggtctgttcctgctgcgcgtcctgctgctggtgcagcacgttcggcgcgccctgcaccgcgccgctgctgagcgccatgctctgctcgctggcggtgcgggtttccaccgcaacgcggctggccgccgggtcaccgaccgtgccctgcacggcgaacaggcgctcaccgttcgggctgggcaccaccgcgtcgatgcgctgcaggccggcggcatgcgcctccctggtcagggccgctgcggcgctttccagcgcgtgacggtccttgaaggtgcccgccggcatccgttccaggccttcggtggcctgcaggtacatcggattgcgcgggtgccgctcgtcgttcagcagcgggcgctcgcgggcctccttgatcgcatccagcgtcttcgcaccgacgatgccgtcggcaaccagcccgttgtccttctgcagctggcgtaccgccgcttcggtattgcggccgaagcggccgtcctcggccagcggcttgccgtcggccccggcatagccgaggtggcccagctgctcctgcaccttgcgcacgccctcgccgtgcgcgcccggcttgtacagctcggcgtgcggggcggcagcggccttgtgttcggccgcaggcttgccctgggtctgctcatgcgattgggtgcggctttccagcaggtcgcgcgccttggacaacgggtccgacgcgaacagcttccagtgcgggtggtccttcacctgcttgaggtaatcctccaccggcatggtgtgcacgcccttgctgccggtggactggctgatcagcagcttgtcggtgttcgggtcgcgcaccaccatcacgatgtggtcgatgccattccagtgctcgtggcgggtcctggccgtatccaggccgatgaccatgccttccttcagcgcaccgggcttgaggatggcgtcgcgctcgagcagcacgccggactgttcgacggccttgtgcacgatgccgccggaaccgaggttgcccaggtcgatgcggtcggccttgctgaagacagcgtgcccggccttctggttgatctcgtccatggtccggttctgcagggtgccgacccagccggagcaatcgatgtagccctggtccacgttcttgccggtcttgcccggcacgtacagcgcgtggcccgggatgttgatggcgtacttcacatcgtcgtacttcacgccagcgtcgtacgcggcgtgcagttcgatgcccggcttcggcgcagcaggagccgttgcggtcgccgccagcgtggccgcagcggcacccactgcggcggtctgcgcaggtgtgcctggagcctgggcctggcccggtgccacggtctgcggcgtgatgtgcttttccgggatgctgatcgctgcgtacttgtggatgtagtagctggagaaggtccgcgccaggtcgccgtcgttcatgccacgcatttcggccagggtgtggccggtcagcgccttggcatcggacccgatctggttgagcacgttgcggcgcatgttgatctcttcgccatggccgttgcggaccacgccgaaggtgccggtggcgatcgcggtctgcaccgagccatagccggcgctgccctgctggtgggccaggtacaggtccaggccggtcggcgtgtcgccgccggacaggtacgggtggccggtgcgctcattgcggcgcgccatcgagcccaggttgtcctggtacatctgcgcggcggcttcggtgttgcgggtcgggtcgaattcgtggccggtcaggtggtattggcgggccgagccgggcacgaactggaacaggcctttggcgccggtcgaggtgttgtgggcgcgctcgttgaaggtgccgccggtctcgatgtgcgcgaagcgcatgaagtcatcgaccgggatgcccttctgccgggcgacctgctcgacgatgtccaggacttcctttttgctgtagtcatgctgtgccatgacgttttcctcggggttgatggagcggccgatgccgcgaatcgccaaccggactcatccgtgagtcaagaacatgtcggtcaacaggtaacccgcctgcggcggatggaaatcagggcgcgatgtactgctgggccttgctgtcgaagcggtagtgcacggtgtcgccggcacccagcgcgcgggtcttgcccggggcttcgatggtggtgcccttgaaggtcacggtcagctgcggcaggccgttgccatcggccacgaaggccagttcgccatcgctgtcggtgcacggcatcacgttgccgtcgtcgcaggccgcgctgttgtcttcgccggtgcgcaccgagccgacgtagcgccagaccttgctgtccaggtcgtcctcgctgcgcttggggttgaacagcagcagggcgtagccgctgctgctgatgccgcggtcgaagctgctggtcggcaccgccagcagcaggcggccgtcggcggtgcggtgttcgatcggcttgcgccgggtatcgacgtcgtcggccttgtcgtaggcgccgagcgcaccgatggtccattcctggccgcggaacttccacggcttcttcgcgtcgccgccggccagtacgaaggtggcctcggccagattggcgcggtcgtcggggccggccggctgctgttcgcccggcttgccgtaatgctcgcgggtatcccaggaaaagccggtgtagtaggtggtgccgtccagggtgaagcggtggccgaaccagaaggtcgccacgctgccgttctggacctcataggacgtcgcaccgtcgccatccacctggtagatgaaatacatcacggtcggcgcgtcgggcggggtgacggcggcatcgggggaggggttctgcatcggggcaacatcctgtcggggcgctttggcagcctgcgcaggcgcaggctgggaggacgagggggccggatcggcggcgctgcaggcggcagcggaaagagagacgagcaggcatgccgcgaatgcgcgcaggggccgcaacggcagggtccaacgtagctcggggggggactgcatgcgcctctccatggtcagcgttgccgggccagacggccggcaggaagccgcaccccatccaccacggacgggagcgaggacatgagccggtcgattccttcgacctcgcattgagaactcatgcctgtccatcttggcacagatccgcaggccgtcaaagagggggggcggcagccgggtctgtgatgtgaagtgcgtctcagagcgtgttcaaagtcttttgagcaagagcaccaagaatgccaagtggacgaactgcaggctggtgttgagccatcgctcgcagttcttccacagcctcctgttcttgtccagccaggcaaagctgcgttccacgacccagcgcttgggcatcactttgaaagtgtgaagctcgcttctcttggcgatctgcaccgtcacatgccctcccagaatctgctgcacgccttgcgcgaacggccgaccgatgtagcctgcatcgcacagcaggctttgtagccggctcaaccggggcttgcagcgctgtagcgcctgcagtgcgcctttgcggtccgtcacctcggccgtggtcaccgctatcgcatgcggcaatccctgggtgtccaccgcgatgtggcgcttgatgcccgagaccttcttgcctgcgtcatagcccttcaagcccgccgtgtccgtgttcttcacgctctgcgcgtccacgatcaagagcgtgctgcaggcgttgcgccccagtttctcgcgggccgcgccaacctgatttttttaatgcctgctccagcaggctgccaccctcgcgtggctcgctccagatggcaaagtacgagtgcacggtgcgccatttgggaaagtcgctgggcagtgcccgccactgacagcccgtgcgcagcaggtacagcacggcgcagaacacctcgtacagctccactttgcgtggggcagtctttctgcgcgcactctccagcaatggccggatcacctcgaactgctcgcgcttgatgtcgctggggtagccttttctcacccagcgagcttctcacatcaagagggcgagactttgaacacgttctcagatcttgccgtcacgcaggtagtcgaacaattcggcgtcgcccttcagccccagcttgagcatggcgtcgcccttctgccggctgatggtgctgacgctcttgtgcagctgcagcgaaatctccttcaccgtcatgccggtgccgagcagtcgcagcacctccacttcgcgtggtgacaacggcttgccgtcgccctcgcgcatgcgccagctgccggccgcgtccacccgctcgcgcaggctgcggctgatgtagggctggccgcggtacaccgactggatggcctgcggcagctcgtccattgacgaactcttgtcgaccagaccgagcacgccactgtcgagcaccatgcgcaggatcgccaggttgctggagacgctgagcatcagcaccggcaggtccggatgccggcggcggatcatgccgatcatggcgaagccatcggcctgcgggctgcccggcatggagtagtcggtgaccagcaggtcacagggctggttggcgagcagggtcatcagcgcctgcgcgctgtcggcctcgccgactacgcggcccacgccgctcgactcgatgacggcgcgggtaccgatgcggaccaccgggtgatcgtctgcgatgatgatgcgcaagctcatgctctagtatggccatcgggcacgccgggccgcgaccatcgcggtccctggcaggattctaggagatcgacgcagatgcgtaggtgggctgttcgcgggctgctcctgctgctggcggtgctggccctgcccgtggcccaggcacagccggcccctgggctgctgccgctcagcccgttgcagcgcgaatacctggtggcgcatccgaccatcgttgtcgggcagtatgacagcggttggccgcccttcgagtccctccgtgacggccagcaggtcggtctgggaccggactacctgtcgcatcttgcacgccagctcggcatgaaggtcgaggcgcgccgctatccggactggacatccgtgctggatgcggcatgtcgtggcgagatcgacgtggtgatgaatgtcggcctcagtgccgaccgcacccgctgcatggtctataccgcggcctacagcgaagcgccgctggccctggtgggccggccggacgacctgcgtgcctccgacatgcccgacctggagggtctgcgggtggtgatcgagcaggatttcctgaccggtccgcaggtgcgcgcccgattcccgcgtgcccgccagcttgtcgtaaacgacacgttgagcgcattgcagatggtcagagacgacaaggccgacgtctacatcggcaatgcctttgtcgccaccgagctgattgcgagccggcgcctgcagggcgtggcgctgttgcggcccagcgacctgccccctgaacggctgcacttcggcattcccaacagcaagcaacccctggctgaagccctggacctggcgctggcggccaccagccaggcccagcgtgatgccctcgcacaacgatggctgccaccgccgcactggtcggcatcggcgcagctggcgctgagccaggccgagaagcgcgtgctggagcggccgttgaagatcggtttcgccccgaatgccgcgccactgtcgttcaccggcgaggatggccggcccagcgggctggccagcgaatacctgcagcgcctgatgcaggccggtgccaacctgcaggtcgaggacagccacgactggtacgaggtgcgcgagaaggcccgccgcggtgagctgcaggcggtgatgggcattcctgtcgattcacggtacctgggcccggactgggtgttcagccagcccttcatcagcgtgccgaacgtgattgtggtcaggagcgatggcgagtcgctgctgggcctggctgacctgcagggcaagcgcgtgctgctgtccgacccggagcgtgtgcgcggctacgtgctgcagcaggcaccgcaggcgcggatcatcgctgcacgcagcgccgaacagtcgctgcagcgcctgctcgctggcgacgccgatgcgtacattggcaaccttgccgtggtcgatcacctgctgcgcagccgtttcccggggcggctgcaggtggcggcaccggccggcttcaacgaccagctggtgctggctgtggaccgccgccacgcggcactggctaccaccttcgatcgcctgctgctgcagatgaccccacgcaagcgcgaggccctgcgcaatgcctggctgggggtggagtaccgcaacggtgtcgactggaacaaggtgctgcggtggggcgtgccggtgctgctggtgctgctgaccgcgctgctggtacatggcgtcggccattggcggctgcgccgcgaggtggcaggacgtcgccagctggagcagcgtctggccgaggtgaccgacaacctgcctgcagtggtctatcaggcgcgtcgcggcgccgatggcgcgctcagcttcccgttcatcgccggtgacctgcctgcgttgttcggcattacacggcagcaggccgaacaggatgcgagggtgttgctggaacgcatcgaggaagaggaccgcgcgcacatcctgcactccatcgagcaggccgcgcgccagttcgccccattgatcctggagttccgcctgcgcagcgatggggagggcgtgcgctgggtgcgcagccaggcccacccctatgccgccgaagagggcgcggtgatctggagcggttactgggtggacgtgagcgaagcgcggatgcaggccgatgccctggcggcggcgaaggcggacgccgagcaggccgccgaggccaaatcgcgcttcctggccacgatgagccatgagatccgcacgccgatgagtggcgtgctggggatgctggaggtgctggcgcactcaccgctggacagcgaacagcagcgcatcctcggcgttatcgaggattcggcccagatgctgcggcagatcctcgatgacatcctcgattactcgcggctggaagcaggggcgttgcgcctggaaccggtgccgcaaccgctgcggcccctgctggagagcgtgtgccgcctgctgtcggcccaggccagcgcgcgtggcctggcgctgcacgtgcagatcgatcccgagctggcgccggcccacgaagtggacggcgtgcggctgcgtcagatcgtgttcaacctgctcagcaatgccatcaagttcaccgcacagggcgaggtgcgcctgcagctggaggtgctggggccgaccagcgaagacggcgtgcaaccgctgtgcctgagcgttaccgacaccggcatcggcatcgcaccagaacaactgcagcacctgttcgcgccctttacgcaggccggtgcctacatccagcgtgaccacggcggcactggcctgggcttgagcatctgccagcgactggtgcagatgatgcagggcgaattgaccctgcacagcacgctgggcgaaggaacccgcgccgaagtgcgggtatcgctggtggaggccggcagcgaggacgcggcggcactgctggccgagcaggaccagtccgcgctgctgcccgccgcgctgcgccaggcgcgggtgctggtgatcgaggaccacccgaccaaccaggcgatgatggcgtggcggctgcagcagctgggcgtgccccatgtgctgctgggcgatggccagcaggcgctggatcgcctgtcgtcggagagcttcgacctggtgatcaccgactgccgcatgccggtactcgatggatttggcttcacccgcctgctgcgcgaacgcgagggccgtaccggccagccgcggctgacggtgctggcgctgaccgccagcgtgctggacgacgatgcgcgccgctgccgcgaggccggcatggacgaggtactggccaagccgctgtcgctggccacgctgcgtgcggcgctgctgcgctggctgccgcaggcccagggccagtcgttcgagctgccggtgccggaggttgccgccgacgacggtgaagcattgcctgatttggccaccctgcagcagcgcttcggctcgcgcgtggtggccgagcagctgcgcgacagcctgttgcaggccagcgagggtgacctggccgccgtgcagcgtgccgtgcaggctggcgaccgccaggctgcggcgctgcacctgcatcgccaggccggcgggctcggggcgatcggggccacggcactggcccagcaggccaatgccctggtcgagcgcctgcaggatgcggcagaggccgatacggcgccgttgttcgccaccgtaacgacgttcgtggcgcggctgcagcaacagctgcagcgcctggctcactgagccgactgctgctgcaggtaggcgatcaccagggcgcggcgttctgcgctggggaaggcgttgtacatgcgggtgcccggcaccaggtgcgtgggtgactgcaggaaggtatccagcgtctgtgcggtccaggtgatgtcggcgcggcgcatgccgtcggaatacccatagtcgggcaggctgccggcgcggcggccgatcacgccgtgcaggttgggtccgaagcggtggatgccaccgggctgcacggtgtggcagccggcacacagttcgaacgcgcgctgcatggcctgctgccgggcctgttcgggcgtggccggcaccgcgggcgggcgctggcaggccgtggcaagcagggccacggcaacggcggtgagcaggcggcaggcacgcatgggtgggcaggatagcggtgcggtggagcggtcgggctgcgacacacggtcgcagcccggggcgatcacatgcccgagtagttcgggccgccgccgccctgcggggtcacccagacgatgttctgggtcggatccttgatgtcgcaggtcttgcagtgcacgcagttctgcgcgttgatctgcaggcgcgcattgtcggcttcgccaacgaactcgtacacaccggccgggcaatagcgggcttccgggcctgcgtactcggccaggttcaccttcaccggaatgctggggtccttcagcgtcaggtggctgggctggttctcgtcgtggttggtgctgctcaggaacaccgagctgaggcggtcgaaggtcagcaccccatccggcttcgggtaggcgatgcgggtgtgcttggcggccggttccaggcaggcatgatccggctgcgtgcggtgcagggtccacggcgggttgcgcacgcccagcttcggcagcagccactgctcgacgccggtcatcagcgtggccacggtctggcccttcttgaaccactgcttgaagttcttggcctgctgcagttcggtgaacagccagctggcttcgaacgccttcgggtaggcgctcagttcatcgtgctggcggtcggcggccagcgcgtcgaacgcggcgtcggcgcacagcatgccggtcttgatcgcggcatggctgcccttgatgcggctggcgttgaggtagccggcctcgcagccgaccagtgcaccgcccgggaacaccgtcttcggcagcgacagcaggccaccggcggtgatcgcacgcgcgccgtaaccgatgcgggtaccgccttccagatgcttgcggatggacggatgggtcttgaagcgctggaactcttcgaatgggctcagccacgggttcctgtagtccaggccgaccacgtagccgatggcgaccttgccgccgtcggcgtggtacaggaacgcgccgccgtaggtgtcgctgtccagcggccagccggcggcgtgaaccaccagacccggctcatgccgggacgggtcgatctgccacagctccttgatgccgatgccgtaggcctgcgggtccttgccttcgtccagcgtgtaacgcgcgatcaactggcggccgagatggccgcgcgcgccttcggcgaagatcgtgtatttcgcctgcagcgccatgccgcgctcgaacgccgggccgatgctgccatccttctcgatacccatgtcgccggtggccacgccgatcacttcaccgttgtcgccgtacagcacctcggctgcggcgaagccggggaagatcgccacttccagcgcctcggcctgctgcgccagccagcgggtcacttcgcccaggctgatgatgtagttgccttcgttgtggaagcactccggcagcagcgcgttgggcgtgctgcgcgcgccggtttcgctgaggaacaggaattcgtcacgggtgaccttctgcttcagcggtgcgccgcgctcggcccagtccgggaacagctcggtcagcgcgcgcggatccatcaccgcaccagacagcacgtgcgcgcctggttcggaccccttctccagcacgcacaccgacaactcgcggccggcttcgatcgcgcgctggcgcaggcggatcgcggtggccaggccggcggggccggcgccgacgatcaccacgtcgaattccattacttcacgcgggggcagggcgttggcttcagcgctcatcgattgcatgactcgtgggtagggccggcatcggggccaccggcggtgcctgggaatcgcgcgtgcagccacgagcgaaacggttgtttgaatgtgtcagggtaccgggccgcgcgtgatcgagctagatcgccgatgttcacgtcacgattgctgcggtgcagcgtaaggctgcggcccgggtgggtgccgaccctggtcggcacgctctgcccggatgaccgacaatggccgggtcctgactgcgcgtgagtgccatggctttgcatccgtacgatctgttcgatgtccgttccctgctcaatgaggaagagcgcgcggtgcaggagagcgtcgcccgcttcaccaacgagcgcgtgctgccgatcatcggcgatgccttcgaccaggcccgtttcccctctgaactggtgccggagatcgcctcgctgggcctgctgggcgccaccctgccggccgaatacggcggcggtgatctgggtgcggtcagctatggcttgatctgccaggagctggagcgcggcgattcgggcctgcgcagcttcgtctcggtgcagagctcgctgtgcatgtacccgatctacgcttacggcagcgaagaacagcgccaacagtggctgccggcgatggcacgcggcgaactgatcggctgtttcggcctgaccgaggcgcacggcggttccgatccggccagcatgaagacccgcgcggtgcgcgacggcagcgactggcgcatcagcggcagcaagatgtggatcaccagcggcgcggtggccgacctggccatcgtctgggcgcagaccgaggacggcatccagggcttcgtgctggagaagggcatggccggcttcaccacgcaggagatcaagcacaagatgagcctgcgcgcgtcgctgaccggcgcgctgttcttcgatgacgtgcgcgtgcccgacagccatcgcctgccgaacgtgaagggcctgaaggggccgctgggctgcctgacccaggcccgttacggcatcagctggggcccgatcggcgcggccattgcctgcctggatgaagcgctgggctatgccaaggagcgcgtgctgttcggccgcccgctggcggccacccagagcgcgcagatcaagctggccgaaatggcccgccgcatcaccaccgcgcagctgctggcgctgcagctgggccgcctgaaggaagccgggcagctgcagccgcagcaggtcagcctggccaaatggaacaactgccgcatggcgatcgacatcgcccgcgaatgtcgcgatctgctgggtggggccggcatcaccaccgaacacgtggcgatccggcacgcgctgaacctcgaatcggtgatcacctatgaaggcaccgagaccgtgcaccagctggtgatcggccgcgaactgaccggcatcaacgcgttctgagtgcaccggtagtgccggccgctggccggcattgccgagtacggtgggcggcaacggacgcctatccggagatgcaaactgaatgaagaacaattccactgtaagactgctgtgcctcccgctgctcttccaagcctccgtgctgcagatggcgtgggcaggcaacagggacgatgcggcatgggcaggcagctattcgcaggcgagcgatctgtgtaccgaaccgggcagcggacgcagttgccgcgatgggttgagggacagcctgtcgattgtcgaagaatcactgggctatagggttgagctgcacagtacccagtcgatgcagcacgtctgctccttcgtgctgcatatgaagccagaaggcggaaaactgattcatcagtccgaactgggcacagtggctatcgagaaacatgcaggtgcgctgagagtctcatccggcgggatcgacccgacggtgacgggcttgggcatgtgcggtgcgcatgccgatattgatggtctggagttttcttctgtcggcaatcgcacgcgccccgggcaacgcaagggcgcccactcctgattgatccaggcggaaggcatccacgcatggcgtggatctactgcgcagctgttgggtccgccttgaagcgagccgagcaccgcaggtccggtgggggcgaagaggcgcgggtgtctgagcgcagcgagttccgcgccgtcccccggcgggccgaggagcgcagggtaccggtgcgcagcaccggctcgcggatggcggcgcgtttcttttggttacttttctttccgcgcggaaagaaaagtaacgcccatgaacgcatgcgcgcgcttcagcagtcgggcgcaagggagaagcatggcctcacgcgccgccggcaaacccatgctgccgccacgcctcgtacatcaccacggcaacggtgttggaaagattgaggctgcggttgcccggccgcatcggcaggcgcaggcggcggccatccggcagcgcatcgagcacgtcctgcggcaggccacggctttccgggccgaacaggaaggcatcgccatcttcgaacgccacgctgtcgtagcggacgctggcacgcgtactcagggcgaacaaccgcttcggtgcgatccgcgccagcgcggtgtccaggtcggggtgcacctgcaggcgcgagtactcgtggtagtccaggccggcgcgcttgagctgcttgtcttccagtgcgaagccgagcggctcgaccaggtgcagctgcgcgccggtgttggcgcagagccggatcacattgcccgtgttgggcgggatttccggttggaacaggattacgtggaactggggcgcggcattcatcggcgcagtgtacctgcgacggcggccgcctctacggcgcacgccctgcgctgggcagggcggcaccgcttacgggcgcagcaggacctgggcggtttcggtggccagggcctgcaggtctgcagcgctcggacgcacctgcagggccggcaggttgacgatcacctggttggcgacgctggtggcagcggcagccagggtcgcggcgtagcgctgggcttccagttcggcggccagggcgacgcgctgttccaggctcgggcgcacttccaccgaagccagggtggtgatcggcatcgcggcggcgaccggggcggcgacgtagccgttgcgctcggccagctggtcggcgctcgggcgcacttccacggtggccagggtcgggatgccgctggcctgttcccaggcctgctgggccagctggtcggcggccgggcgaacctgcacggtggccagggtcttgatggattcggaggcctgcaccgacgaaacaaccgcggtgccggcgatcagggcgatggcgatggcaatggtcttggcgttcatgacggggcctgtttagtgttggtgatcagtggtgtggtagtaaggtagtacaccaattctggggacgcaagaagaattttcgatttcctgcatttgttcagtcttcagtcagcttgagtctgaagcctttcctggcgcaggaagtgccaagcaatccccgtgccaacttttattcattgatttacaagggttttttatcaatcgaaaagtgtccggtgggcggacacctgtccattcgatgtgccgcggacactgtccggacgccttcagccggcacatgtgacggttcacgccccccggctggggccgggccggatggccttcagggcaaacacccccagtgactggcgaccgattcctgccgttgcctgcgcaggctaggatcgggattcacctatgtgaccaaggatccggatatgtctctcgcccttcgcccgcgcgccgcattgctggccgtcgccctcagcaccgccctgggcacgcttgcgcccacctccgcgcttgccgccaggccggcggcaccggccaaggtcgatatcccgtacgagcagttcaccctgcccaacggcctgcgcgtgatcgtgcataccgatcgcaaggcgccgatcgtcgcggtcaacgtctggtaccacgtgggcagcaaggatgagccggccggccgcaccggcttcgcgcacctgttcgagcacctgatgttccagggcagcgagaaccacgacggcgaattcttcgaaccgttcaagcaggtcggtgccaccaaccagaacggcaccaccaacaccgatcgcaccaactacttcgagaacgtgccgaccaccgcgctggacatggcgctgtggatggagtcggaccgcatgggccatctggtcggtgcgatcgaccaggctgcgctggacgagcagcgcggcgtggtgcagaacgagaagcgccagggcgagaaccagccctacggccaggcctgggaccagatcaacaaggcgctgtatccggttggccacccgtaccaccacggcgtgatcggctcgatgaacgatctcaacgcggcctcgctggatgacgtgaagacctggttccgcacctggtatggcccgaacaacgcggtgctggtgctggccggcgacatcgatctggccaccgccaaggagaaggtcgccaggtacttcggcagcatccccgctggcccgaccatggcgcagccggcggtgaacgtggccaagcgcagtgccgatacccgcgagacgatgaccgacaaggtgccgcaggcgcgcatctaccgcgcctggaacgtgccgcaggtcggcaccgccgacatcgaccagttgcagctgttctccgaagtgctgggcggcgccaagtcctcacgcctgagccagcgcctgcagcaccaggacaagctggtggacagcatcggctcgggcctgtcgacgtcgcagctgggctccaacttcgtgatcgtggcgaccgtcaagcagggccaggacccggccaaggtcgagaagatcatcgacgaggaactggaccgcctgatcaagcagggcccgaccgcggccgagctggagcgcgccaagaccggcgcccgtgccggcttcatccgtggcatcgagcgcatcggtggcttcggcggcaaggccgatgcgctggccgagtgcgcggtgttcaccggcgacccgggttgcttccgcacctcgctggccaacatcgagaaggccagtgccgccgatctgagccgcctgggcgcacagtggctggacaagggcagccacaccctggtgatcgcaccgggtgagcgcgtggcgctgaaggaagaaccgagccagacgccgaagccgttcaccgtgccggcggtggacccgaagtacagcaccctgccggaacaggtggaccgcaaggccggcgtgccgcagacccgcgagttcccgcagctgaagttcccggcactgcagcgcgccacgctgaagaacggcacccaggtgatcctggccgaacgccacgagattccggtggtgcagttcagctaccagttcccgggcggcttcagcgccgaccagggtcgcaagcccggcaccgccaacttcaccatgagcctgatgaccgaaggcgccggcaagctcggttcgctggccttcgccgacgccgccgacgcactgggcgccagcctggatgcctcggccggcctggactcgatgagcgtggacctgtcggcgctgaaggaaaacctggcaccgtcgctggcgctgtaccgcgacctgctgcgcgaaccgcgtttcgagcagggcgagatcgaccgggtcaaggcgacctggatcgccggcatccagcaggagaaggtgaacccgggtgcggtggccatgcgcgtgctgccgccgctgctgtacggcaagggccacccgtacgccatcccgttcaccggcagcggcgacgaggcggcgatcaacggcctcacccgcgaagatctggttgatttccaccacgactggctgcgcccgcagaatggcaccctgatcgtggtcggtgacaccaccctggccgagatcgtgccgctgctggacaagcagctgggtgactggaaggcgaccggcgaggcgccgcaggtgaaggcggccaccgatgtcgcgctgccgaagggcccgcgcgtgttcctgatcgaccagccgggtgcggtgcaggccaacctgttcgccggccaggtggtggcgccgtccagcgccgccagttcgacccgcttcgacattgccaacggcgtgatcggcggcgacttcacctcgcgcctgaacatgaacctgcgcgaggacaagcactggtcgtacggcgcgcgcagcagcgcgaccagttcggtgggccagcgcccgtggatggccagtgcgccggtgcagatcgacaagaccggcccggcactggcggaaatgcgcaaggagatcgccgcattcgccgacggcagcaagccggccaccgctgccgaagtcaaccgcatccgcaacatccagaccctcagcctgcccggtgcctacgagaccgccagtgccgtggccgcgaccatcggttcgatcgtgcagttcaagcgcccggacgactatgtgctgcgtcgcaaggccgagatcgaagcgatgaccccggcgcaggtgcagcaggccgctgccgagatcaagccgcaggccctgacctgggtggtggtgggcgatctcaagcagaccgaagcggccgtgcgcgcgctgaacctgggcgaggtgacggtgatcgacgccgagggcaacccggtcaagaaataaggcacgacccggcccgcctgtggcgggccggctcccccggtagtgccggccgctggccggcaaacccttaaggggtcggagccccctgcgggggatccggacccctctgccgacctggggtcggatcccccgcagggggccctgcccccggcccggctacccccgattcaggctgttcaggcagaatcgccccatacccttccaggatctgcccatgcgcgttctgctgctttcctctctgctgctcaccgtcactgcctgtacctgggtgccgatcgaaccggccggcaaggcgacccgcgtgttgccggcaggtccggttccggccggctgcatcgccaagggcgaggtggtggtcaccgtgaagagcaaggtcggcttctacaaccgcaacccgctgcgcgtgcaggaagagctggaaaccctggcccgcaacgaggccccgagtgccggcgccaacgccgtacaggccgctgccgcgcccgccgatggcagccagcggttcgccgcgttccagtgcccgccgcgctgaacgcttcaccatacggccaagcctgaattcgtaaagatgcggtgaaggccccgggggttatagaatagcgcccccttttgcctgagccttggcgctaacctcgatgctcttcaagaatgtctcgatcgccggcctggcacacgttgatgcgccgcatacgctgacgaccaaggaaatcaacgagcggctgcagccgacgttggatcgcctcggtatccgcaccgacgtgctcggcgatatcgccggcatccatgcccgccgcctgtgggacaacggcgtgctggcgtccgatgccgccaccatggccggccgcaaggcgctggaagacgcaggcatcgatgcgacgcaggtcggcctgctggtcaacacctcggtcagccgcgactacctggagccgtccaccgcctcgatcgtgtcgggcaacctcggcgtcagcgacgagtgcatgaccttcgacgtcgccaatgcctgcctggccttcatcaacggcatggatatcgcggcgcgcatgatcgagcgtggcgacatcgactacgcgctggtggtggatggcgagaccgccaacctggtgtacgagaagaccctggagcgcatgaccgccccggacgtcaccgccgacgacttccgcaacgagctggccgccctgaccaccggttcgggcgccgccgcgatggtgatggcgcgctcggaactggtgccggatgcaccccgctacaagggtggcgtgacccgttcggccaccgagtggaaccagctgtgcctgggcaatctggaccgcatggtcaccgatacccgcctgctgctgatcgaaggcatcaagctggcccagaagaccttcaccgccgccaagatcgccttgggctgggccgtggaagagctggaccagttcgtgatccaccaggtcagccagccgcacaccgctgcgttcatcaagaacttcggcatcgacccgaagaaggtcatgaccatcttcggcgagcacggcaacatcggcccggcctcggtgccgatcgtgctgagcaagctcaagcagctgggcaagctgaagaagggcgatcgcattgcacttctgggcattggttccggcctgaactgctcgatggccgaagtggtctggtaagcagccccctgcccgacctcctgtagagccgagccatgctcggctcacgcgcgcagcgcggctcttccgcagcggaccggagagcagccgagcatcggttcggctccacattgcgccgcgactctccctaggtgctccgcatgcgcgatcttcccggttaccccgcccacccgcagcgcttcgaggttcgccccggcctgtcgatgaactatctcgacgaaggcccgcgcgatggcgaagtggtggtgatggtgcatggcaacccgtcgtggagctattactggcgcacgctggtggccggcctgtcggacacataccgctgcatcgtgccggaccacatcggcatgggcctgtcggacaagcccgatgacagccgctacgagtacacgctgcagtcgcgcgttgacgacctcgatgcgctgctgaagcacctgggcatcaccggcccggtgaccctggcggtgcacgactggggcggcatgatcggtttcggctgggcgctgtcgcaccacgaccaggtcaagcgcctggtggtgctcaataccgccgcgttcccgatgccggcggcgaagacgatgccgtggcagatcgcgctgggccgccactggaagatcggcgagtggatcatccgcagcttcaatgcgttctcgtccggtgcctcgtggctgggcgtggagcggaagatgccggccgacgtgcgccgcgcctacgtgtcgccgtacaacagctgggccaaccgcatcagcaccatccgtttcatgcaggacatcccgctgtcgccggccgacaaggcctggtcgctgctggagcgggccggcaaggcgctgccgtcgttcgccgaccgaccggccttcctcggctggggcctgcgcgacttcgtgttcgaccaccacttcctgaagggcttccaggccgcgttgccgcaggcccaggtgcatgccttcgaggacgccgggcactacgtgctggaagacaagcacgaagtgctggtgccggagatccgcgcttttctggacaagaacccgatctgatcggtgtgccgaccaacggtcggcacccaccccttcctcttccggtgggtgccgaccgttggtcggcacacccgaagggttcatgaggttgccggccagcggccggcactactacgccgcgaccggtgcctgcggcggtgaggacgggctgttgccgttgtcgtccgggtgatcgtcgtcattgtcggcgtcatcgcgccagcgccagtcggccagcgtcagcgggtccaggccgtaggcgatgcgtgccttgtcgcactgcgggctggccttgccgtactcccacgatgcatccacctcacggcacacgctgggccggttggggtggatggtgcagcgtgagtacacgccgatctgcgcgtccagcgccacgcagcgcaccggcttggagtgggtgccgcgcatgcacaggcggtgcgggtccagcacctcggtcagctggtgcggtacgccgccgggggtgacctcgtccgattccatccagtggaaggccacgcggtattgggtgcagcaggcgccgcaggtcatgcagggatgttgcatgggcaagccgcctcgggcggcagtcggaatcaggaacgagggtgcggattttccacgaagtgggccgccgcgcaagaaattccgtaagcggcgacaatgaacggatgaaccgaccctgcaacattgccgcgcgcctgcctgaactggcgcgtgaacgccctgaccagatcgccatccgctgcccgggccgccggggcgccggcaacggcatggccgcctacgatgtcaccctggattaccgccagttggacgcccgcagtgatgccatggccgccggcctggccggctatgggatcggccgtggagtgcgcacggtggtgatggtgcggccgtcgccggagttcttcctgctgatgttcgcgttgttcaagctgggcgcggtgccggtgctggtcgatccgggcatcgacaagcgcgcgctgaaacagtgcctggacgaggcgcagccgcaggccttcatcggcattccgttggcgcacgtggcgcggctggcgctgcgctgggcgccgtcggcaacccgcctggtcaccgttggccgccgcctcggctggggcggtaccagcctggccgcgctggagcgcgccggcgccaagggcggggcgatgctggccgataccgatggcgaggacatggcggcgatcctgttcaccagcggctccaccggtgtgcccaagggcgtggtctaccgccaccgccacttcgtgggccagatccagctgctgggcagcgcgttcggcatggaagcgggcggcgtggacctgccgaccttcccgccctttgccttgttcgacccggcgctgggcctgacctcggtgatcccggacatggacccgacccggccggcgcaggccgatccggcacgcctgcacgatgccatccagcgcttcggcgtgacccagctgttcggctcgccggcattgatgcgggtgctggcccggcatggccggccgttgccgacggtgacccgggtgacctcggccggtgcgccggtgccgccggacgtggtcgccaccatccgcagcctgctgcccgccgatgcgcagttctggaccccgtacggcgccaccgagtgcctgccggtggcggtggtcgaggggcgtgagctggagcgtacccgcgcggccaccgaggccggcgccggcacctgcgtgggcagcgtggtggccccgaacgaagtgcgcatcatcgccatcgatgacgcgccgctggccgactggtcgcaggcgcgcgtgctggcggttggcgaagtgggagaaatcacggtggctggcccgaccgccaccgacagctacttcaaccgcccgcaggccacggccgcagcgaagatccgcgagacgctggccgatggcagcacccgcatcgtccatcgcatgggtgacgtgggctacttcgatgcgcagggccggctgtggttctgcgggcgcaagacccatcgcgtggaaaccgcacaagggccgctgtacaccgaacaggtcgagccggtgttcaataccgtgcccggcgtggcacgcacggcactggtcggcgttggcccggcgggtgcgcaggtaccggtgctgtgcgtggaactgcagcgtggccagagcgacagcccggcgttgcaggaagcgctgcgtgcgcatgccgcagcgcgcacccctgaggccggcctgcagcacttcctgatgcatcccgcgttccccgtcgatatccgtcacaacgccaagatcggccgcgagaagctcgccgtctgggccagcgccgaactggagaagcgcgcatgaagatcctggtcaccggtggtggtggtttccttggccaggcgctgtgccgcgggctggtcgaacgtggccaccaggtgctggcgttcaaccgcagccactacccggaactgcaggccatgggcgtgggccagatccgcggcgatctggccgatgcgcaggcagtgctgcacgcggtggccggcgtcgatgcggtgttccacaacggcgccaaggccggcgcctggggcagctatgacagctaccaccaggccaacgtggtcggcaccgacaatgtcattgcggcatgccgcgcgcacggcatcaaccggctggtctacacctcaacgcccagcgtgacccaccgcgccacgcatccggtggaaggcctgggggctgacgaggtgccgtacggtgaggacttccaggcaccgtatgcggcgaccaaggcgatcgccgaacagcgcgtgctggccgccaacgatgtatcgctggcgacggtggcactgcgcccgcgcctgatctggggcccgggtgaccagcagctggtgccacgcctggccgagcgtgcacgtcagggccgcctgcgcttggtcggcgacggcaacaacaaggtcgataccacctacatcgacaacgccgcgctcgcgcatttcctcgctttcgaggcattggcgccgggtgccgcgtgtgcgggcaaggcctacttcatttccaacggcgaaccgctgcccatgcgcgaactggtcaaccggctgctggccgctgttggcgcgccgacggtggacaaggcgatcagtttcaagaccgcctatcgcatcggcgcggtctgcgaacggctgtggccgctgctgcgcctgcgtggcgagccgccgctgacccgcttcctggccgagcagctgtgcacgccgcactggtacagcatggagccggcccgccgggatttcggctatgtgccgcaggtcagcatcgaagaagggctgcgcaggctgaaggcttcatctgctgcatagatcgccgtcactggttgcacaccgcaggatcgggaggatggacccacgccatccaaggctcgaccacccgcgaggagcgccatgctgcattacgccatcattttctttgtcatcgccatcatcgccgccgttctgggcttttccggcattgccggcgccgcaacgaacatcgcctggatcctgttcgtggtgttcctgatccttgcggtgatctcgatgttccgcaagcgcggctagccggtagtgccggccgctggccggcatcgctttccgcagagtcgagccatgctcgactctgcgggcgatcacaacgctacgcggcgctgtgcaatccgcgatcggcttcgtgacgctccagtgccagttcgatcaggcgcgtaatcaacgtcgtgtaatcgactccgctggcaccccacaatttcgggtacatgctgatgcgggtgaagcccggcagcgtgttgacctcgttgatgacgatcccgccgccggcagtaaggaatacgtccacgcgcgccatgccggcacactccagcgcctggtaggcctgcagtgcgatctgccggatgcgcgcctgggttgcggcatcgatatccgcaggtaccaccacctcggcgccagtttcgttgatgtacttggtgtcgtaggcgtagaactcgtcgtgcaccaccacctcgccgcacaggctggcgtgcgggtgcgcgttgcccagtaccgcgcactcgatctcgcggccgaccaccgccgattccaccagcaccttgtggtcgtagcgcagcgccaatgccagtgcctcggcgaagcccgctgcgtccttgaccttgctcacgcccaccgacgaaccctggttggccggcttcacgaacagcggcaggccgagctgcgcgatcaccgcatcgacatcgaccgttgccgcctggtggcgacggatgcacagccacggtgccacctgcaggccagcgtcgcgcagcaggcgcttggtcacgtccttgtccatcgccactgccgaacccagtaccggcgagccgacgaagggcaggttggccatgcgcagcaggccctgcagcgcaccgtcttcgcccagcggcccatgcacgatcggcagcaccacatcgatctggcccagcgcgctggccggatcggacggctgcagctgtgcctgttccgcacccgggcgcaccgccagcgactggcccgagcgatgcagcgcgatgcgcgacggatcatcggcgttgatcaggaaggtgtccggctggttcagatgccactggccctgcttgtcgatgccgaccagcaccggctcgaagcgctcgcgatcaagcgcatcgaggatgttcttcgccgactgcagtgaaacctcgtgctcggaggatttgcccccgaagatgatgccgacccgggtccgtgccatgggaatgcgatgtcctgtgcgttgcgtggccgtacagcatgaaccttccatagccacccaggtgaggcacagatgaatcaccgggctgccggctcgggtagcggccaaccatggttggccccctgacatccagcgccgaccaaggtcggcatctaccaacgcgagatcccatcagcattggggtcagagcccgttgcggagcaacgggatccgaccccggatagtccgacagatcgcagcaaactgtcgaaggcggggtgggtccggttgcgggggcgtgagccgcatggatgcggcgaccgagcttacatggacgtacttgcagcgtcccccgcaatcggacccaccccgccatcccacggatagccagcttttgatgttgatcttgccggccagaggccggtgcctctgcgggtgccgggcggcagcccggcgcaagccccccacccacgcaggtagaatgcgcacatggctctttccctgctcaagtccctcaagccggtcgctggccgcgccctgcagatcgccctgaaccgcgcgctggcgctggatccggatacccgccatgcactggccagcctcgatggccggcacatcgacctgaccctggaagcgccgtcgctggcgatgcgcatcagcgtcgacggcgaccagctgcgggtcggcccggtggatgcgcaggaagccgacctggccgtgcgcagcagcctggccggtgtgctggcgcagctgccgctgctggccaacgcacggcgcggcgagtccaacaacaagggccgtgtacgcgtggccggtgacgccgaactggcgcgccgcctgcagcagctggccaagggcttcgacccggactggcagcagccgttcgtcagcgtgttcggcgaggtactgggcgtgcaggtggccaacaccctgcgcagcgccctgcagcacgcgcgccagggtgcgatcgatctggcccacagcgctgccgagttcatcaccgaggaatcgcgcgacgtggtaccgcgcgccgaactggatgccttccacgatgatgtggacgtactgcgtgatgacgtcgagcgccttggcgcgcgcgtccagcgcctgcggggtgccgcatgaaggccgtgctgcgggcaagccgcatcggccgggtgatcctgcgctaccgcctggacgacctgctgcacggcacgccggctgagcgctggctgcgcctggccaaaccgttcgtgccgcgtgcttcggccgacatcgctgtacagtcgcgcggtgcgcgcctgcgcctggcgctgcaggatctcggcccgatcttcgtcaagttcggccagatcctgtccacccgccgcgacctggtgccgccggacgtggccaacgaactgaccctgctgcaggaccgggtcaagccgttcgacggcgataccgcgcgccgcatcgtcgaggaagcactcggcctgccggtcagcgaggcattcgccagcttcgataccgaaccgctggcctcggcctcgatcgcacaggtgcatgcggccacgctggccgatggccgccaggtggtggtcaaggtgctgcgcccgggcatcgagaagcagatcgacgccgacatcgccctgctcaactcgctggccgccctggtcgagcgtacccatccgcgtgccgacaagatccgtccgcgcgaagtggtggccgaagtcgagaacaccctggccgctgagctggacctgcagcgcgaaggcgccaatgccagcgtgctgcgccgcttctgggaaaacagcgacgacctgtacgtgccggaagtgatctggagccacaccgccgagcgcgcgctgaccctggagcgcgtgtggggcattccgtccgatgacatcgctgcactggacaaggccggcatcgaccgcaaggcgctggccgccaagggcgtgcgggtgttctacacccaggtgttccgcgacaacttcttccatgccgatgcgcacgccggcaacatctgggtcgataccgatccgtcgcgtcgcgccaacccgcgcttcatcgcgctggacttcggcatcatgggccagctgtcgcaggaagatcagtactacctggccgagaacttcatggccatcttcaaccgcgattatcgccgcatcgccgaactgcacgtgcaggcgcgctggatgccggacaacgtgcgcatcgatgatctggaagcggccgtgcgttcggtgtgcgagccgtacttcacccgcccgctgtcgcagatctcgctggccgaagtgctgatgaagctgttccgcgtggcgcagcgctaccagctgaccctgcagccgcagctgatcctgctgcagaagaccctgctgaacatcgaaggtgtcgggcgccagctggatccgcagatcgacatctgggcggtggccaagccggtgctggcgaagatcctgcgcgagcgctacagcccgcgtcgggtcgtgcgcgagatcggcaagcgcttgccggaaatcatgacccacgcgccggacatgccgcgcctggtgcacgcctggctgacccagcaggtggagggccgccatgagctggcgatgcgctcgcgcgatctggtcgcgctcgatgccagcgtgcagcgcctgcagaaacgcgcggtcggtgcgatcaccggcgtcggtctgctggccatcgccgcactggtgtacgtgctgcagccgccaggctggtactggggcgacctgccgatgtggagctgggtgtccggtgccgtcggcgcgctggcgctggcgcgcgcgtggtggcgctgaagcctgttgatcgagggtcggcggcgtcacgcgccgccgaccagccacggctctaccagtggtagcccaggcccaggtgcgactgcacgctctggaagcggtccaggcgcgtcctgtgccaggtcttgccaatgcccatgtccagcaccagatgctcccccagcggctggctgcggcgcaggaaggcacgacgtgcatcgtgttcgcgcagcagcagcggatcggaatcggcggtgtagccggacgtaccgctgcccagccacagctgggtcgaaccaccgccctgcgcatccttcaggcgcagtgacagcgtggtgccatggccgtcgggcccattggactggcgatgccgctcgtggcgcagtgaggtggtcacgcgcgggaagtagtgcgaggcacctaccgaccagccactcacgtatgcgccggcatggtactgggcgtacttgccgcccacgctcagcacggtctgcggtgccaccttccactggaagtcctggttgagctggcggttgacgaataccgggtcatcgttggaggcggtgaaggcggtgcgggtcgaaaagcgttgactccagcgctggtgcagggagccctgcacccgattgccgctgaagcgcttgctgccgtagtcgcgttcaccatgggccaggcccagatgccagcggctgtcaccgctgcgaccggccacatccacggtctgtacgtcgcgcttgccaaagccatcggtgtagtcggcatgatccagctgcaccgagacccggtcgatgccggcatgggcgctggacacagccagcagcaggacgcacggcagtgcgccacggatgatcaatcgcatggggttactccaggggttgggaatgcagcgactgcagcagccggtagcgaccgggcggcaggtttcgttccacggtgatgcgcgggccgaactggctgcccggggcgacgatgcgaccgggcaggatgatcacgccgacgcccagcgcggcaccttcgccgatccaggcgccgagcttgtcgcgctggctgtcgatgacggtgtcgccgatgtggacggtgaccgttgcgccatccaggcgatggttgctggtacgcaccagcgcgcccaggtaggcacgggcgtcgacgcggctgtcggcgatgaagcactgcgggccgatgcaggcgccgtcgccgatcagtgcgttcttcagttcactggcaaagccgatgcgcacaccgtcaccgatgtgcagcggaccgcgcagcagtgcgttgttgccgatcaggcagtcgcggccgatcgataccggcccgtgcagctgggcgccgtcgcagatgcggctgccagcgccgatccgtacctcgccccgcacgatcgcacgcggcgaaacctgggcgctggaatcgacgtggggtggcagcgtcgatagcgcgtcggccatggcggcgaggtcattccaccacatgcggatacctggtcggcttgtcgcgtgccggctcgcggccggtaaacagcccggccacgccatgcatcagccagatcgcataggcgagcagcacatacagcatcgagaacgcggcggcagggaccagcgacgcgcggcggtggtggatcgcactgatcaccgccagcaacatgacgatgccgatccagaacaacggcatcaccgacagggcgaggccacccggcccatgcagctgggccgcaccgaaccagacctgcagcgtcagcacgatgccggcaagggcaagcagcatcatcggcaggatgctgaacacgccgaagcgggtcagcagcaggccgcgatgcaggcgcatgcataccgcatagccgacgatccagcgtcgccagcgccgccattcctccaccagcgtgttgcattcctgcgggtagaccacgcagcgcacgctctggcggacacggtagccctgcgcgaccagcgaccaggacatgtccaggtcttcgacgcgggtgcggtcggagaagccgaccttgcgcagcaccgaggtgcggaacaggccacacgagccggagacgatgaacggtgcgccgcccagccactgctggaagctgcgcttgatgacgatcatcggcagcttcaggctggcgcgcacatgcggcaggaagccggcaccctgcaggctggacgagggtacgccaccgaccgcatcggcaccgcgctcgatctcgtccagcaggtggcccaggccatggccgcgcggatcgatgtgggtgtcggcgtcggtcaggaacacctgctcggcggtggcgtgccgcaggccatgcatcagcgcgccgcccttgccggtgttggcctggtgcacggccacgaggcgcccgggccagcgcgcctgcagcgcatcaagtacctgggcggtgttgtcggtcgaaccgtcgttcacgcagatcacccgtgccacgtaggggttctgcagcaggccggtcaacgagcgctccaggcacggcgcttcgttgtaggccggcacgatcgcatcgatgctgtacaggcgcgtgctggggcgacgcgaggcctgcacgcacacacgcaccaggatgaaggcacacatggccaggaacagcagcgttttcatcacagcaccagccggtagggcacgaagccctcactggggccgatgccgatctgctggccgcggaactgcgcgtggcagcgcaggtggtcctcctgcatgtagtggcgatcgccctggctggcatgctcgcgcaatgcgtggatcttcaggtccagttgtgcgctgatgtcctcgaacacctgcggtgcgaactgcggcagggtgctggggctctcgtagcagaggatctgcgggatgctgcggcaggcgatgattgacgcttcatggacggtgcgatggtcctgatggtggtcttcgccgcacatcgtgtagacgcgatgcggtgcgatctgcgcgcaggcctgctcgatcaccgcgacgatgtcgttgcggcaggcaggaaagcgcgtatccgggaaatcctgctggatcacctcggtcacacccaggcggcgcaacgcgcggtgggattcgtcgctgcggtcgatgccggcatggcagccacggccaccacggctgagcaccagcgcatggatgcgtgcaccgtcgcgggccagcttggccaggctgccgccgcaaccgagttcgatgtcgtcggggtgggcgccgattgccagaatgtcgagaaccatggccgtgtccttgcggaaaccaatgagggccgcgggccggtggaccatcccgcgtgaagaaggcgggaactatcgcaaccccatcggagtacaggcttaagacaagtacgaaatgtggccggacaggccacaatgttcacccttgctgtggcaaatgaaagaagcaatgacgatgcagctttcggaattgaagaacgaactggcacgcttcggtgctgaaaacgacgcgcatgaaaccgagcgcgcccggcgcatgctcaacatcacgccggacaccggtgaattcctgtcggtgctggtgcgtttcggcaatgcgcgccgggtgctggagatcggcacctccaacggttattccacgctgtggattgccgaagccgcagccgccatcgacggccacgtgaccacactggaatacgccgcggacaaggtggcgatggcgcgtgacaccttcgcgcgcagtggccttgccgatcgcatcacgctggtccacggcgatgccgggcagtggctggcacaggccgccgatgccagcattgacctgctgttcctcgattcggaccgcgaacagtacgccggctggtggccgcagctgcgccgtgtgctgcggcggggcggcctgctggtggtggacaacgccacctcgcacgccgcgcagatggaaccgttgcgcgcgttgctggatgccgatccggacttcggcaccagcctggtgccggtgggcaacggcgagcttctggccgtgcgcaacgcttgaccgccgcgccaccaacccggggtcagatccctttccgcaggaaaagggatctgaccccgatcagggcgcccgtataatcctgcggtgagcaccgaacctgacaccctcgccgcggtcgagaccgaaaccgcgcccctgcagctgctgcacctggacgagcgcctggccgtggtcaacaagcccgccgggctgatggtccacgacagcaagctggcccgtggcgaagatgatttcctggccgaccgcctgcgcgagcagctgggccgcccgatcttcctcgtgcaccgcctggaccgggccaccagcggctgcctgctgctggccttcgaccgcgagaccgccagtgcgctgggcaaggcgttgatggggggtgaagtggccaaggactacctgacggtctgccggggctggccggccgagctgtcctggcgggtggaccatgacctggacggcgggccgggcaagccggtgaagaagccggcggtcaccgacttccagcgcctggccaccggcgagctgtcggtgccggtgggtgagttcagcagttcgcgctacgcgctgctgcgctgccagccgcagaccgggcgcttccggcagatccgccggcacctcaagcacctgtcgcaccacatgatcggcgacaccagccacggcgatggccgccacaaccgcatcttccgcatgcagggcgtgcaccgcatgctgctgcacgccgagcgcctgcgcttcccgcacccggacggtggcagcgtggatgtcagtgcgccgctggatcgcgagttccagaaggcgctggacctgttcggctggcaggtggacgacgcctgatgctgctgcggtaagccgagcgtgggctcggctctacagccagcggccgggcgtggcccggcgcaccccgttatttcttttccggctcgttgacgatcgcttccaggtccttctgcagatccgcgaacagcggctgcatgcgcgcctggatcgccaccatcacgttctgcatcagcgccggggtcttgtccagcaggctctggccggccgcgctctcgtagaactcggccattgccagcacgtcttccttgctgaaggtcttcttgtacaggtccacgtacatgggccgcagctgttgccacgacatcgcctggcgcagggtctggctggtccgggcctggatccgcttcagctgttcctgctgctgggcggtgagctggcgctgcgcggccacctgctggaactgctgctgctgcatggcttcgatctgaggcaccatggtgtcgatcatgctctgcgcgcgcgaggccgacagcaggcggttgatgtcgccgtcggtcggcggggcggccagggccggaacgctggccacggccagcgccagcagcagggcggcgcggcgcagcagggacggcagggcgggtgtggagcgggtcatgcggggcttcctgcggtacatgggaccgccagcatacccgcagcccaggcgaaggcggcgtgttcggtgcctgatcggcggcatacggcgcgcgatggcgtacttcaccacgtgcctgccgctacaatgcgcggatgggcagtggaccggtcaccatcagcgcgcagcttgaaatccccgacggcgagatcgtcgagcggttcgtgcgcgccagtggcgccggcggccagaacgtcaacaaggtgtccaccgcggtggaactgcgtttcgacgtggccaactcgccctcgttgcccgaaccgttgcgcgcgcgcctgctggcgcggcgtgaccggcgcatgaccggcgaaggcgtgctggtcatcgacgcgcaacgattccgcacccaggatcgcaatcgcgaggatgcgcgcgagcggctggcggccttcatccaggccgggctgagcgtgcccaaaccgcgcaaggccaccaagccgaccctcgggtcgaaactgcgtcgtctggacgccaaacgcgggcgcgcgcagatcaagcgcgggcgctcatcacgtgactgggagtgattgcttgaacaacccgacttcgttgctgccggccgtgccgccgcagatgccacaggtcaaacccaacgccttcctgcgctggctggcgcgctgcacccttcgcatgggcggctggaaggtgaccggcaccctgccggacatccccaggctggtcttcatcatcgccccgcattcgtccaactgggacgggctgtggggcatggcggccaagatcgcgctgggcatgaaggtgaaggtgctgggcaaggcctcgctgttctggtggccgctgggcccgctgctgcacaagctgggcgtgatcccgctcgatcgcagctcgccgcagggcaccgtcggccaggccgtggacctgctgcgcaacaacgagaagatgtggttcgccatcacgcccgagggcacccgcaaggccgtgaaggactggaaggccggcttcctgaagattgcccggatggctgacgtaccgatcctgaccgcgtatttccactatccggaaaagaccatcggcatcggtccgctgttcaccccgagcggcgacgatgtggccgacatggctgccatccgcgagttctaccggccctggatcggcaagacccgcggcacggtctgagccggttgcaggccgccgcatagacgccacgtccggcacatgccgggcgagcgcgacaggagtagggtggagggctggtatccataccgtctgcccaaggagcgttttacatgtcgcgtaccgtagtcctggccgccgccatcagcctggcgctggcggcctgttccggcaaggagtccacccccgtgtccgatgcccagaagaccccggcccagcagccggccgaagcctccaccaatccgctgctgagtgccagcacgctgccgttccaggccccgccgttcgacaagatcaaggacagcgactacctgccggccttcgaagagggcatgcgccagcacctggccgacgtgcgcaggatcgccgacagcagcgagccggccaccttcgacaacaccatcgtggcgatggagcgcagcggcgagaccctgacccgcgtgtcgcgcatcttcttcggcctggtccaggccgataccaacgatgcgcgccagaagatccaggaagaagtggcgccgaagctggccgcgcaccaggacgagatcaacctcgacccgaagctgttcgcacgcgtgaagtcgctgtacgaccagcgtgacacgctggagctggacccggtgcagaagcgcctggtcgagcactactacgatggcctggtgcgcgccggtgcgcagctgtccgacgctgacaaggcgaccctgcgcaagctcaacgtggaagagaccaccctctccacccagttccatacccgcctggtggccgccaccgccgctgcggccgttgtcgttgacgacaaggccaagctggtcggcctggacgagggcgctatcaacaacgctgccgccgccgccaaggaccgcaagctggatggcaagttcctgctgccgctgcagaacaccacccagcagccggtgctcggctcgctgagcgaccgcgaccagcgcgccgcagtgctgaaggcctcggaaacccgcgccgagcgcggcgatgccaacgacacccggcagaccgtgcagcgcctggcccagctgcgtgcgcagaaggccaagctgctcggctttgacaccttcgccgactaccagctgggcgaccagatggccaagaccccggccgccgcgctcaagctgctgaccgacaccgtgccggccgccactgccaaggcgcgtgccgaagccggcgagatccagaaggtgatcgacgcgcagaagggcggattccaggtggccgcttcggactgggacttctacgccgagcaggtgcgcaaggccaagtacgatctggacgagtcgcagatcaagccgtacttcgaactggacaacgtgctgcagaacggcgtcttctacgccgccacccagctgtacggcatcaccttcaagccgcgcaccgacattccgacctacaacccggacatgaaggtgtacgaagtgttcgacaaggacggcacctcgctggcgctgttctacaccgactacttcaagcgtgacagcaagtccggtggcgcctggatggacgtgttcgtcgaacaggacggcctgaccggtgccaagccggtggtctacaacgtctgcaacttcaccaagccggccgccggccagcctgcgctgatcagcttcgacgacgtcaccaccatgttccatgagttcggccatgcgctgcacggcatgttctcgaacgtgaagtacccgtcgatcgccggcaccgcgacctcgcgcgacttcgtcgagttcccgtcgcagttcaacgagcactgggcgctggacccgaaggtgttcgccaactacgccaagcactacaagaccggcgaggcgatgccgcaggagctggtcgacaagatcctcaaggcacgcagcttcaaccagggctacgcgacgaccgagtacctgtcggccgcgctgctggacctggcctggcacacgcagaaggccgacgcgccgctgcaggatgtcggcgcctttgaagccagcgcgctgaagaagttcaaggtcgacctgccgcaggtgccgccgcgttaccgcaccacctacttcgaccacatctggggtggtggctactcggccggttactacgcctacttctgggccgaagtgctcgaccacgatgcctaccagtggttcaccgagcacggtggcctgacggcggccaatggccaggagttccgcgacaagatcctctcgcgcggcaacagcgtggaactgtcgaccctgtaccgcgatttccgcggcaaggacccgtcggtggaaccgctgctgaagttccgcgggttgaagtaagaaagcgaaaacggcgggggcaaccccgccgtttttctttctgtagcgtcgagccatgctcgacgttcttctgtagagccgagcccacgctcggctgatggttcctggaaaggcagccgagcatgggctcggctctacaaacagcgttacgttcccacgtgcacccggttggcctgctcggccaggcccaggtgatccagcgcgatatccagcgccagcacgtaactctgcgcgccgtagccggcggcgatgcccaggcgctggccgacaccagccggcaggcacggctcggctaccgcgccgtcgtcatgcacttccacataggcgttgtgcaggtacggcagcaggcgctgcaggcgcaggctgttggcacacgcgcccgggtcgagcagggtcacctcgccgcggctgtggtcggccacgcgcagggcgtccagcagttcctgttccgaaccacaggcacggatcgccacgctggtgccggcgtcgatcgcacgatgcaccagtgacttcaggaccggtgccggcagcggcatcgcggtgcggatcagggcgccggccgcttccgggccacggatgatgaagatcgacatggctcagccctcctgtgccaggcggcggccgacaatggccagcgacaacgggtagccggcctgctggctgcgctggtcgaccaccacggcggcgggaccgtgctgcaggcgcaggcgtgcctccagaccgggttcgctgggggcctgcagttcgatgtactgcgccggcagccgttccagcgccgcctgcagcgcgccaccttcggcctgccattgcgcctcgtcagcggtaccgacatccagcagtacccagtcggccgagcgcgcctgcggctggcacaggcactggcgtacctcggacaggctggcgcagtcgctgcacagcacgcgatggccggccagctgcgtcggcagttggggacgcggtgccgacgaagaggcgtggcggatcaccaggagggtcatacaacaccttgcggaatgcgccctgcggcgcggtgggcacacgatgcgcgtgccgcccgtaaaggtgcgatgcccgccgccggtcccgcgcgtaaaacctgcgtaacccttcctgtagagccgagcctgcgctcggccgctctgcgccccagtcgggcaacctcgacgctgcaaggaacaagccgagcgtgggctcggctctaccggatcgcgtcgcgggaacctctcccgcctggatgtggtctgatgcagctaccacccacccggagcctgtcatggatgctgctgcccgtcctcccttgtccgaacgcgcgctggtctggctgaagaaggaagcattgccgctgctggtgatgctcggcctgctcgccgccgcccgcgataccctcgccaaccactacgtggtgccgagtggctcgatgcagccgaccctgcagccgggcgaccgggtggtggtggacatgcgcgcctacggcctgcgcctgccgttcaccggcaaggaactgatggccaccggcgtcccgcagcgcggtgaagtggcggtgttcgattcaccggccgacggcacccgcctgatcaagcgcgtggcggcggtggccggtgaccacgtgcagatgcgcgagggccatctgagcatcaacggccagccgctgcagatcgccgatctgcaggacgtggaagccttcggcgagcgccgtgcccgcctcgacctggacatgggcggcggtccggacatcgccgatctggtggtgccggccggcaaggtgctggtgctgggtgaccaccgcggcaacagcttcgacggccgcttcttcggcttcgtcgacgccgacaaggtctacggccgtgcggtggcggtgtactaccgccgcggcgacggtttcgagtggcagcgcctgtaagctgaattgatacttcttgggtatcaatcctgacttatcaggttatggatcgactggatcgacaggcctagtctgaggcccgttccctcccatgcccggccgccccaccggcccttcgatcccatgactggcgaaaccgcggcggccgtcgagcgccgcccccccactgtcgatcccatcgccgagacccgcatccagcagggcacgccggccttccgccgcaccgcgctggcactgttcctggccggcttctccaccttcggcctgctgtacaccgtgcagccgctgctgcccgagttcagccgccacttcggcgtgtccgccgcaggcagcgcgatgtcgttgtcgctgaccaccggcacgctggcggtggcgatgctgttggccggcctgctgtccgatgcggtcggccgccgcccgttgatgattgccgcgctgctggcctcggccatgctgtcgctgagcacggcgctggtggacgactggaccacgctgctggtgctgcgcaccctgcttggcctggcgctgagcggcgtgccggcagtggcgatgacctacctggtcgaggagatggacagccgcgcgctgggcctggcgatgggcctgtacatcggcggcaacgccatcggtggcatgagcgggcgcctgctggccggcatcatcgccgatcactggggctggcgctggggcatcggcgtggtctcgatcatcgccgtggccagcaccgtgctgctgtggctgcagctgccgccgtcgcgccatttcagcgcgcgacgcgatggcctgcgcgagttgccgtcgcgctggcgcacgctgttcgccgaccggggcctgccgtggctgttcgccacctcgttcgtgctgatgggcgtgttcgtcaccctctacaactacctgggttatcacttgctggcgccgccgtaccacctcagccagaccgtggtcgggctgatcttcagcgtctacctggtgggcaccttcagttcggcgtggatgggccagcaggctacgcggtacgggcgcggccgcatcctgtcgatctcgttcgcgctgatcggcgccggcatcgcgctgctggcgatgccgtggctgagcacgatggcactgggcatcgcgctggtgaccttcggcttcttcggtggtcactcggtggccagcagctgggtcggcagccgtgccggtacgatgcgcgcggaagcatcggcgctgtacctgttcgcctactacctgggctccagcgtgctgggcggggtgggtggcctggcctacgcggcctgggactggctgggcgtgtgcgcgttcgctgccgtgctgaccctgatcgggggcggcatcgtctgggcgctgcagcagcgcgcgccgcagccggtcacggcctgacgccagcctcgcgttccgcacgggcgcggcgttgctctggtagatgccgaccttggtcggcgctctggcacggcagccaaccaaggttggcgtctaccaaacctaagtgggtggcacttcacccttcggcgaacgccccgcgcagcagcccggcgaagttgcggatcagcggcgtgacgccctcgcgatgccacgccagctgcacctccgaatgcgcaccggcgtcggccagcgccacgaagcgcgcgccttccacgcggatgtgatcgcaggacgagggcaggatcgccgcacccaggcctgcagccgcaagactgatcaatgtcgatgcctcaccggcttcctgcacgatgcgcggcgtgaacccggcggccgcgcacagcgcgatcatgtggtcatggatgcccgcgcccgcgctgcggcgaaatgccacgaacggctcctgcgcgaagtcgcgtagcgacaacgtgccctgcttcgacagcctgcgcagggcagggtggtcggcatgcacgatcaacgccagtggatcgacgaacaggctgtgcgccaccagctccggcggcaatgcgcgcttgcggatgatgcccacgtccagtgaaccgtcgagcagcgcatcgatctgctgcagcgtgttcatctcgctcagctgcagccgcacctgtgggtactgctggcggtagcgcaggatcgaacgcggaatctgcggcgacagcggcgtggcccgggtcaggccgatacgcagttcgccctgctcgccgcgctgcgcgcgctgtacctcgtccaccgcggtttccacctgctgcacgatggcgcgcgcgcgctcctgcagcagctcacccgcaggcgtcagctgcacacgacgatggctgcgcacgaacaggcgcgccccgatcaggtcttccagctggcggatctgctggctgagcggcggctgcgacatgcccagccgctccgccgcctggccgaagtgcagcgtatcggcaacggcgaggaagtaacgcaggtggcggagttcgatggacatgcgcccagtctatgcatcgccagccggaaatggggtcagatccgttttcctgcggaaaacggatctgaccccggtcacccgtcatccacgcatggcgtggatctaccgtgtcgaccaaggtcgacacctacccacagcagcagataccaacagcagcaggaatctgtcagaggcggggcggtgtgggtgggcaggaccgttggcgccatggatggcgccatcgagcccccagggatgggtttacggcgtgtcctgcccacccacaccgccccgccatctacggatagcaggcttttgctgttgctttggcttcagcaggtgcagggcgcagccctgccgaacaccctcaccgctccgaatgcccgctctggtcgtaatcgcgcggactgaacaactccggctggatcagctcgatgaacgcgcgcgcctgcgccgacagcgccttgccccggcgcacgatcaccccgtaactgcgctcggggaaccagcgcttcatcgaccgcgccgccaaccgctcgcggtcggcctcgttcaggcacagcgccggcacgatggaaatgcccatgcccatcgccacgtactgcttgatcacctcccagccgcccacttccagtgccacggtgtaggcgatgcggtagcgctggaatacctggtcaaccagccggtaggtgatctgccgcttcggcggcagcaccagcggatagcgcgcgatgtcggccagctccagctcgccgccactggccagcggatggtcgtgcggcgcgatcagtacctgctcgaagcggtaggccggggcgtaggtcaggtcggccggtacatcggtcatcgaaccgatcgccaggtcggcggcgtcctcgcgcagcaggtcggtgccatcggcgctgatcgcgttgtgcagggtcaggcgcacgtccgggtggtgcaggcggaagcgctcgacgattttcggcagcaggtacaggatggtcgagctgttggcggcgatgttcagctcgcccgcgtccaggccgcgcaccttgtcgcggaagcgcgcctccagcccgtccagattctccaccagcggctgcgccatttcgtacagcagctggccctcgcggctgggcaccaggcgccgcccgctgcgctcgaacagcggcacccccagttcccgttccagggcctgcaactgcaggctgatggccggctggctgacgaaaagtgcctcagccgcccgtgagaccgagcccaggcgcaccgtctggcagaacgcacgcaatggcttcagccggtcggatttgtaggaaaaacgcggacttggcggggtgcgtgtgctcatcgtgtcacgagtattagcacaacttatgtagaacattgcaaaaactgttttgccaaatactccggcccagcggcaccgtggagacgttcccccaccgctggagtcgccccatgtccgccgtcgcttccgctgttcccacccctgccagcaaggctacccccggcatcgccctggcgacccgcgtggccggccaggacaccgtgctgccggcgccgctgctggccctgctggtgtcgctgcaccgtgcggtggaaccgggccggcaggcacggctgcaggcgcgccgcgagcgccaggcgttcttcgaccagggcggcctgccggacttccgcgaggacaccgctgcgatccgtagcggcgactggcgcgttgcgccgctgccggccgcgctgcaggaccgccgcgtcgagatcaccggcccgaccgatccgaagatggtcatcaacgcgctgaactccggcgccaaggtgttcatggccgacttcgaggattcgacctcgccgacctggcgcaacctgctggccgggcagcggtcgctggccgccgcggtgcgtggcgatctcgactacaccgcccccaatggcaagcactacacgctgcgcccgcatgacgagcaggcggtgctgatcgtgcgcccgcgtggctggcacctggacgaaaagcacgtgcgcatcgatggccagttcatcgccggcggcctgttcgacgcggcggtgttcgccttccacaacgcccgcaccctgcaggcgaaggaccgcggcccgtacttctacctgcccaagctgcagagcatggaagaggcggcgctgtgggaaacagcgctgtcgcacatcgaaggcatgctcggcctgccgcacggccagatcaaggtaaccgtgctgatcgaaacgctgccggcggtgttcgagatggatgagatcctgcacgcgctgcgtgaccgcatcgtcggcctgaactgtgggcgctgggactacatcttctcgtacctgaagaccttccggcgccacgccgaccgcgtgctgcccgagcgcggccaggtgaccatgacccagccgttcctgaaggcctattcggaactgctgatccagacctgccatcgccgtggtgcacatgcgatgggtggcatggccgcgcagattccgatcaacaacgatgccgccgccaacgaacaggcgatggcccgcgtgcgcgctgacaagctgcgcgaagtgaccgccggccacgacggcacctgggtcgcgcatccggcgctgattccggtggcgatggcgatcttcgacgaacacatgcccggtgcgaaccagcacagcgtgctgcgccaggatgtgtgcgtcggccgcgacgaactgatcgcacggccgcccggcaccatcacccgcgccggcttcgaaggcaacgtggaagtctgcgtgcgctacctggcggcatggctggatggcaacggctgcgtgccgatccaccacctgatggaggacgcggccaccgccgagatcagccgcagccagttgtggcagtggctgcatacgccgggccagcagctggacgatggcaccgccatcgacctggcactgctggatgccacgctggcacagctgccggcacggctgggtgacaccgccacgctgcccggtggcgcacgcatcggcgaggccatcgccctgctcggcgaactgagccgcagcgacgaactgaccgatttcctgaccctgccggcctacgcgcgcatcgactgatcgccgcccgcgattcccggcgtttccctccccgctgcacgcacgaaccgaactggagaaagacatgagcaagctgcccactgccgaacagatccagcacgactgggataccaacccgcgctgggaaggcatccagcgcaactacagtgccgccgacgtggtgcgcctgcgcggcaccgtccacatcgagcattcgctggcccgcctgggtgcggagaagctgtgggcatcgctgcatgagcgcgagttcgtcaacgcgctgggtgcattgaccggcaaccaggccatgcagcaggtcaaggcgggcctgaaggcgatctacctgtccggttggcaggtggcggccgacgccaacctggccgggcagatgtatccggaccagtcgctgtacccggccgattcggtgccggcagtggtcaagcgcatcaacaacacgctgctgcgcgccgaccagctgcaccacgccgaaggcaaggacgacatcgacttcctgcagccgatcgtcgccgatgcggaggccggtttcggcggcgtgctcaatgcgttcgagctgatgaaggcgatgatcgaggccggtgccgccggcgtgcatttcgaagaccagctggcgtcggtgaagaagtgcgggcacatgggcggcaaggtgctggtgccgacccgcgaggcgatcgagaagctcaatgccgcgcggctggccgccgatgtgctgggtgtgccgaccctgctggtggcgcgcaccgatgccgaagcggctgatctgctgaccagcgacatcgacggcaacgacaagccgttcaccaccggcgagcgcaccgtcgaaggcttctacaagacccgcaacggccgggaccaggcgatcagccgtggcctggcctacgcgccctacgccgacctggtgtggtgcgagaccggcaagccggacctggaattcgcacgcaggttcgccgaggcgatccatgcgaagttcccgggcaagctgctggcctacaactgctcgcccagcttcaactggaagaagaacctggacgacgccaccattgcgaagttccagcgcgaactgggcagctacggctacaagttccagttcatcaccctggccgggttccatgcgttgaactacggcatgttcaatctggcccacggctacgcacgccgccagatgagcgcgttcgtcgagttgcaggaagccgagttcgaagcggccgagcgcggcttcactgcggtcaagcaccagcgcgaggtcggtaccggctacttcgatgcggtgacccaggcgatccagcagggccagtcgtcgaccaccgcgctgaccggctcgaccgaggaagaacagttccatggcgggcgcagcgaacgcgcggcgtgatgcggcgcgccgcgtgatccggtggtgccggccgctggccggcaacccatcgatgtttccgaagcccatgcagttgccggccagcggccggcactaccgggctccgggtgatcagggtggccagggaagggccagacaacgccggccggtcgggggacctgccggcgttgttgtatcgatgcaagggcgcagcacgcgcggagcgtcaatcaggcgcaccccggtgccggcaacttggccgaaaccctgtgaaacccggcatcggattgatccagcaggagttttgcccggacacccgtgaccagaacgggccatcaccgatcttcacatcaatcaagatcggcagaagggtcaaaatgagatagggcgcacactttaaagcggtgctatgctccgcggctcaccaggggacgctggcggcgggtgcagggaatgaccggcaggggtgcggccgagaacagtgatgtgacgacaggtatcgcccgggtggcgatggccgagatcgtgcacgctctgttgtccgatgccgaggtggcattgttcgccagattcgcccgcgcatgcaagctccgtgccggacagtggctgttccagcgtggccaccgcggcgagcgcatgtatgtgatcctcgaaggccagatcgaactggacttcggcgaggacctggtgatcaagacgctcgggcagcacgagttcttcggagaactgggcctgctggtcggcgaccacctgcgcagcgccagtgcgcgcgcgctggtcgactgcgatgtgctggagctgggcccggccgatttccatcggctggtcgaatccgatcccggcctggtggcctatttcctgcgccgcacgatcatgcgcgtgctggccaacgaacaggcactgatcgcacagctgcgccggcgcaaccacgatctggaaaccgcgctggacaatctgtacatcactacccatcagttgacccacacccgtgagctggtgcgtaccgatgaactgaccgggctgcacaaccggcgaggcctcaccctgtacctgcaggagtgccgcgagcgggccgaggggccgccgcaggcgctgctgctgatcgattgcgaccgcttcaagcagatcaacgaccgccacggccaccaggccggcgaccgcgtgctgcagagcatgggcaacatcctgcgctcgatggccggcgagcaggacctggcctgccggcttggtggcgatgagttctgcctgatcctgcgccgtggcaaccgcgagatcgcgcagcacgcggccgagttcatcatcagtgcggtgcatggcctgctcgagcgcagccatggcacgccgcatgtgagcctggtcagcatcggcgcctgcctgctggcgccggaggcaggctggagcgagtggtatgcctgcgcggatcgtgcgctgtaccaggccaagcgcgatggcggcaactgcctgcgctgggcggatgatccggacggccaatagggagaggcaggcgatgaatggcgacaacggaacgtcagccccgcatagcccacagctgcgcgccctgctgttcaccgatctgtgtgattcgctgcagctggtcgagcggatcggcgatgtggcggcggcaagcctgttccaggaacacgatcgcctggtactggtgctgcagcagcgctggaacggccagctgatcgatcgctccgatggcttgttcatgctgttcgagcgcgccgtcgacgcactgggcttcgccctggactaccagcgcgaactgcacgcgctgggccagcagcgcgcgattgaactgcgcgcgcgcgccggcctgcacgtgggcgacgtgctgacctgggagaacagtgccgaggcggtccgtgccggtgccaagtcgatggaggtggaaggcctggccaagccgatggcggcgcgcctgatgatgctggcccgccccggccagatcctgctgtcggcggtggccgaatcgctgacccgccgtgccaccgatgcactgggcgagcgtggcacgcgcctgctgtggaaatcgcacgggcgctggcgcttcaagggcgtgccggtggtgcaggaagtgatcgaagtgggcgagatcggttcggcgccgctgcgcatgccgcgcgccaacgccaaggcgcgccgcgacctgccgctgtggcggcaaccgctggtgctggccgccgaaggcctgatccttgccgcggccgtgctgggcggctggctgctgctgcggtcggagccggccattgccttcgccgaacgtgactgggtggtgcttggcgatgtcgacaacctcaccggcgatccgatcttcgatgactcgatgcggcacgcgatccggatcgcgctggaacagtcgcgctacgtgaacgtgctgtcggaaggcaagatccgcgaaagcctggaaatggcgcggctctcgggcgatacccggctcaaccgcgataccgcggtcgatgtggcggtgcgggagggcgcgcgcgcggtgctgctgccgaccgtgcggcagaagatcggtggctacgagctggccatcgatgttgccgcaccgggcagtggccaggtgatccagaccttcaccgccaccgccgatcgatccgaccagatggtgttcgccgtggacgacgtggtcggtcgcctgcgtcgcggactgggcgagtcggtggccagcctggagcaatccctgccgctgccgcgcgcctcgacccaggacctgcgcgcactgcgcgcgttcgcgctggccgagagcgcactgggtcagcgtcgcttcgaagaagcccgcaacctctaccaggccgcgatcgacatcgatcccggttttgccctggcctacatgggcgtggccaagctgcatgcgcgcaccgcgcaggtcgcggacgcgcgtgacgcgctggagcacgcgctggcccagcagcagcgcctgcccgcgcgtgagcgcctgtacctgaagggctggcaggccgaactggaacccggtggctggccgctggaacagtggcgtgcactggccaagatctatccggattcgtttgctgggctgtccaatacctcctgggggttgctgcaggacaatcgcttcaccgaggccgagccctatgcgcgcgccgcgacggtgcctcaggacccgttgcggctgtatccgaccatccatctggcgcgggcacagctgggcctcggccagccgcagcaggcaatgcgcaccttgcgccaggcacggatgctgcgcggcaatgacgaggccgacgacctggatgtggacgtgctggttgcgcagggcctggatgcacaggcgcagcagctgttgatgcggttgccgcggggggacgacctgcaacagcgcatgcgcctgcgggcccacctgctggtggcagcggagcagcgtgattgcagcagtttgcatgccgcgattgctgcggacggtccagcaccggatctgatcgactaccagatccatcaacgcctgcagcacgccaccgtgaccacgctgtgcacggccggcgatgcgaaggagcttgaatccattgccgccgtgctgcggccgctgctgcggaacaacgacgactccgccgtgggcagccgcagcctgcagctgctggccctgacttatctggcccagcgccagggccagcatgcgctggccgcagagtggctgcgcgaccatggcgaactgctggagcggcagcgcagccctgtggtgggcaagtggcgtcgggttgtgttggcgatggccgaactggcgcaacagcgtccgcgggcggcacgccatctgctcgagcccacctttgatggcagcgaacctgtgcaggcccacgttgtgctgctgcaggcactgcgtgccgagcaggacactgccggcgtgcgtcgcgagcaggcctggctggcccggcaccacggccaggccattgccgaggtggcgtccatgcaggtctggcaacccctgaatgtgcacgacatcgccaccgaggcgacgtcggtgcgagtgtcgcgctgatgcggactcaggcgttgacgcgctcgtcgatgcggtcggcttcgaagcagaacaccacggtcatcgaggcggtcgaggtactcaggtacgcatgcagcgaatcacgggtgcggctcagctcctcgaccgaggccagggtgccgatcttcatgcagtcgttttcgccaacggcaccgtccagcccgatcgaggccagggccttggccggcgaagcggtgaagtggctgcggaacgcttcgctgccgatcaggtggtccagcagggtgctggcgtcggcggcggaaagacggggatggctcatggggattgtccgtaggtggagctactcgtatcggccgcgacagcctgccattgagggccgcgctgtgcacgtcgctaaagttggccgcgctgcggtcgttgctgctatgccggctgtgcggcacaaggaaggaaaccgatgcgcctgcgccgctgcgccagcctgatgttcgagcctcgcgaggcggtcaccctggacctgcgcgcgatgctggccggccacgccgagatggacagccagatcagctgggtggcgctggccgcccacctggaccagccactgccggtggacgccgaggagcgccagctgctgggcgagctcagcgcgcaccgctggagcgaaccgcccgccgatgcctccccggccatgctggcccgcctggtcgagcacggcctgctgttgaccgacccaccgagcgaggtggggcaccagatgcgcgacgaggcgctacggcgcagccagtggtggccattggctgcgctggcccatcgccatgcgcgctggcaggccgtggacagcgtggaggacatgcgccggcaggggttggacaccgcggccggcctgcgccagcgcctggggccgccaccgccggtggtgcagccgatgcagggcgactaccagccgctgccgcgcagcgaagaggccgcgttcgatgcactgctggcgcgtcgcaccacctgccgcaatttcgacccgcagcgcgcgttgccgctgccgctgctggcccaggtgctgcagcgtacgctgatggcgcacgcggtgcagaaggtcgagcgcgataccgagttcctgaagaagaacgtgccttccggtggcggcctgcatcccaccgagggcttcctgctggtgcagaacgtggaaggattggcaccgggcttgtaccactatcatccggtgcagcacgccgtgctgccgctgccctcgccaccgccgcaggcgttgcctgcgatggcgcggcggatgctgtccgggcaggcgtggttcgccgatgcgccagcgctgctggtactggcaccgcgttatgaccgctgcttctggaagtatcgcaaccatgccaaggcgcaccgtgcggtgacgctggacgtgggccacatttcgcagttgctgtacctgtgcgccaccgagcgcgggctggcagcattcgtgacagcggcgatcaacgatgccgatgtcgatcgtgcttttgggttcgatggcatcggccagagcgcgatggccatctgtggcctgggctggcgcagtgccacgctggacacggccgaattcgatccggccgggcgggtggcgacgggcgacgaccgctgagcggccgtcgccccggcgatcaggtcgcctcgaagtccaccagcaccgcgccgtcgccgacctggtcgccggccttggcacggtaacccttcaccgtgccatcggccggtgcctgcagggtgtgctccatcttcatcgcttccagcaccaccagcggcgtgccgcgcttgacctcggtaccggccgcgaccagcgtggccacgatcctgcccggcatgggtgccagcaggctgccggcgtcggccacggcgtggtccgattcacccactggatcatgcagggtgaagcggtgctggccgtcggcgccgaacaggtacagctggttaccatcgcgcagcagctgcagcgacccgcggcgctcgcccagctgcaccgtcagtccgtgcacatcggccgtgccgatcacccgcaccggtgcagcgtcatcgcactgcacgcgccagccatcggcctgcgcccacaccttcagcgtgtgcttgcgttcgccctgctgcagcggcactacgcgcggcgcggacgcaccgaggcgccagccatcctgtgaccgccacggcgaatgcggatcgcgcacgtcggtgctggcgggcaccgtgcttgccaccgcagccacggcggccagcagccacaggtccgcacccgcgtcgcccacggcactcaatgccgcctgttcgcgttcgatcagcgccgtatccagcctggcgtgcgcgaacgaatcggtattcaccaggcggcgcaggaagccggcgttggtggtcacgcccaccacctggcagtcggccagggcctggctcatgcggcgcagcgcggcgtcgcggtccacgtcccagacgatcagcttggcgatcatcggatcgtagtacggggtgatgctgtcaccttcctccacgccggtatcgacgcgcacgttggccgacgctgccggcaggcgcaggcggcgcagggtgccggtggagggcaggaagccacggtcggcatcctcggcgtacagccgcgcttcgatcgcgtggccatggatggccagctggtcctggcgcagcggcagcggttggcccgaagccacgcgcagctgccactccaccaggtcggtgccggtgatgtattcggtgaccgggtgctcgacctgcaggcgggtgttcatttccatgaagtagaaatcgccgtccgggccggcgatgaattccaccgtgcccgccccctcatagcccactgcgcgtgcggcatcgaccgcggccttgcccattgcagcacgacgttcggggctcatgcccggcgcgggtgcttcttccagcaccttctggtggcggcgctgcaccgagcagtcgcgctcgaacaggtagaccgcctcaccgtggctgtcgccgaacacctggatctcgatatggcgcgggcgctcgacgtacttctcgaccagcacgtggtcgttgccgaacgccgaggccgcctcgcgctggcagctggccagcgcatcgacgaagtcctcgctgcgttcgaccttgcgcatgcccttgccaccgccaccggcgctggccttgatcagcaccgggtagccgatgccatcggcctgcgcgcgcaggaagtccggcgcctgctggtcaccgtggtaacccggcgtcagcggcacaccggccttggccatcagcgccttggccgcgctcttgtcacccatcgctcggatcgcgctgggcggtggcccgatgaaggtgatgccggcggcggcacaggcatcggcgaagtcggcattctcggacaggaagccgtaaccggggtggatggcctgtgcgccggtagcgcgcgcggcgtcaagcagggcatcgccacgcaggtagctctcgcgtgcggcggccgggccgatgtggacggcttcgtcggccaggcgcacgtggcgtgcgttgcggtcggcatcggaatacaccgccacggtggcgatgccgaggcggcggcaggtggcgatgacgcggcaggcgatttcgccgcggttggcgatcaggactttgctgaacatggcaacgtgcttcataggagcgtgctcggtcatggcacgggtcacatgcggaacacgccgaagcgcgtctgctgcggggcggcgttgaggctggccgacagcgccagcgccagcacctggcgggtgtcggccggatcgatcacgccgtcgtcccacaggcgcgcgctggcgtagtacgggtggccctgctgttcgaactggtcgcggatcggtgccttgaaggcatcctcttccgccgccggccactggccgcccttggcttcaatgccatcgcgcttgaccgtggccagcacactggcggcctgctcgccgcccatcacgccgatgcgcgcgttcggccacatccacaggaagttcggcgagtacgcacggccgcacatgccgtagttgccggcaccgaacgagccgccgatcaccacggtgaacttgggcaccctggcacaggccaccgccatcaccagcttggcgccgtccttggcgatgccgccctgttcgtacttgcggccgaccatgaagccggtgatgttctgcaggaacaccagcgggatgttgcgctgggtgcacagctcgatgaagtgcgcgcccttcagggccgactcggagaacaggatcccgttgttggcgatgatgccgatcgggtagccgttcagatgggcgaaaccggtcaccagcgttgcgccgtagcgcggcttgaactcgtcgaagcgcgagccatccaccagccgcgcgatcacttcgcgaacgtcgtagggcttgcgcgtatcggccgggatcacgccatacagctcatgggccggcagcaatggcgcttcagggggccgcaccgccatcgccggttccggcttgcgccagttgagctgggcgatgatcgcgcgcacccgtgccagtgcctgcagatcgttgtcggccatgtggtcggccacgccggagatgcgggtgtgcacgtcggcgccacccagttcctcggccgtgaccacttcaccggtggccgccttcaccagcggcgggccgccgaggaagatcgtgccctgctcgcgcacgatcacggtctcgtcactcatcgccggcacataggcgccaccggcggtgcagctgcccatcacgcaggcgatctgcggaatgccctgcgccgacaggttggcctggttgtagaagatgcggccgaaatggtcgcggtcggggaagacttcgtcctgcagcggcaggaacgcgccaccggaatcgaccaggtagatgcacggcaggtggttctgctcggcgatctcctgcgcgcgcaggtgcttcttcaccgtcatcgggtagtaggtgccgcccttgaccgtggcgtcgttggccacgatcacgcattccacgccgctcacccggccgatgccggccaccacgcccgcggcgggcacggcgtcttcatacatgccgtgcgcggccaacggcgcgatttccaggaaggcgctgccggggtcgagcagggcgtcgatgcggtcgcgcaccagcagcttgccgcgcgcggtgtgcttggcgcgtgccgcctcactgccacccagcgcggtgcgcgcgagggtggcatgcaggtcgtcgactacggcctgcatggccgcgcggttgctttcaaacgtttcgctgcccggttgcagctggctgttcaggacggtcatcgcggtggccttacagggtgcgctggaacagttcgcggccgatcagcatgcggcggatctccgaggtgccggcgccgatttcatacagcttggcgtcgcgccacaagcggccggtcgggtattcgttgatgtagccgttgccgccgaggatctggatcgcctggccggtcagccaggtggccttctcggcggcgtacaggatcgcaccggcggcgtcctggcgggtggtgcggccctggtcgcaggcgcgcgccacggcatagacatacgcgcggcaggcacccaggcccacgtacatgtcggcgatcttggcctggatcagctggaagctgccgatcggttcgccgaactggtggcgctcgtgcacatagggcatgaccacgtccatggccgcggccatcaggcccagcgggccaccggacagcaccacgcgctcgtagtccaggccggacatcagtacgcgcacgccaccgccgacctggcccagcacgttctcttcgggaatctcgcagtcctggaacaccagctcgcaggtgggcgaggagcgcatgccgagcttgtccagcttctgcgcggtggagaagcccttcatgcccttctcgaccaggaacgcggtgatgcccttggcaccggcctccatgtcggtcttggcgtagaccaccagcacgtcggcatccgggccgttggtgatccacatcttgttgccgttgagcacgtagcggtcgccgcgcttgtcggcgcgcagcttcatcgacaccacatccgaaccggcacccggttcgctcatcgccagcgcgccgaccaggctgccgttgcacaggccgggcaggaagcgctgcttctgttcttcgttgccgttcttgcgcagctggttcacgcacaggttggagtgcgcgccataggacaggccgatgccgccggaggcgcgcgagatttcttccatcgccaccacgtgggccaggtagcccatgccggtaccaccgtattcttcttccacggtgaggccgagcaggccctgttcgcccagcttcggccacagggccagcgggaactggttgctggcatcagcctcggcggccagcggtgcgacctcggcggcggcaaaatgggccacgctctggcgcagcaggtcgatgtcttcgccaagatcgaagttcagggatggcacgtgcattgtggtggctccacggcgggatggcagggaatggacgcacccggcgggggagcgggcggcggtcggcaggaccgccacccgcacgggcgatggccccagcgtagcggggttcggataagaagtgaatacgaattcaaaaattgaaaccagaatcagaacatggcctataaacgctctgcattgatggaagaacgcctggcgggcgcccgtgaacggatcctgctggccacccgcgagctggtcgccaccggcggctggcgcaacgccccggtgaccgccgtggcgacccaggcgggggtgtccaccggcctgatctatcgccacttcccgtccaaggccgagctgttcgtggaggtgctcaacgccgcggtggcccacgaggtcgcgatcatggagcgcatcgccagcggtccggaggtggccagcgagcgcctgcggctggcaatcaccgccttcgtccgccgcgccctggccgggccggggctggcgcacgccttcatcgtcgaaccggtcgatccggacgtggaggccgagcgcatgcgcggacgtcgcgcgttcggcgacgtgttcctgcggctggtggaggaaggcgtggccgccggtgagctgccggcgcaggacgcgcatgtggccgccgcgtgcctggtcggcgccttcaccgaagcgatggtcggtccgaccgcgcccagccgcgaagcgcaccgcgacgaagacgcgctggtggatgcgatctgcagcttctgcctgcgcgcgatcggtgccccggtaatccggtagcgccggccgctggccggcttctgttgctggggtcagatcccttttgcggcgcaaaagggatctgaccccatccccgaccccagcccccggcatgttgcgccgcaccagcagtgacgcctgttgtcgcacgcaaggcgcgttctatactcggtccatcacgcagtcgctcagccgtggtccaacgactatcagccaggggtaacgaagagtgcggaattacgatctggagttcctgaaacgcttctccatggtgatcgcgctgctggcgaccatcaccctcggcctcatcctccttgccgcctacatccacacccggattccgcccgaggtgtcgcccactgcggccaagcgcaccgaacagcgcatttcgcccaccggcgcggtctatgccggcagcaccggcgccgccgcgcaggccgcggccaaggccgccgcgctggccaaggcggcgtcgcaggtggcctacggcggcaccaaggatggcaaggtgatcttcgacaacctgtgcaccgcctgccacaccaacggtgtgggcatggcaccgacgctggaccattcgcattgggacaagcgcatcgcgcagggcaaggacaccctctacaagcacgccatcgagggctataccggccccgacggcgggatcatgccgcccaagggcggcaacccggcgctgaccgaagaacagatccacgccaccgtggactggatgctgggcaacctgaagtaaccgccgcaacgcgccgcttcctgtagagccgagcccgcgctcggctgcgctccgcgcggtgtggccaggtgcagccgagcatgggctcggctctacgatcccccggctttgcccaccgaggcctgatcgctcatatgcccccgctgcgcaggcggggtttcgcatttcagggttagtctgtgcgcctcttccatggagtcgcccgttgatgcgccgccgttccctcgcccttgccctgtccctgctgctgccggccggcgcctttgcccaggcccagccgcaggccacgccggtcgcgccgccctccgtcgcgcgcggcagcgccactgtggtgctgaccgctgcgccggccgactggcgcgcgctggatgggcagcgcgtgcgcatcgccgcgccgcttaccctggccggtaccgatggcctgcagcacttcggccagctcacggtggcgttcgatggccgcctctggcagccgaccgaagtggccgcgccgggcactgccggctatgagcaggtgatggccgacaaccggcgccgccgcctggtgctggaagatggcagcgatgcccgcgaccccgccagcgtgccctacctgccgggcaacccggtgctgcgcaccggcatgcaactgcgcaatgtggagggcatcgtgcgcgtggacgcgcagggccatccgcgcctgcaggtcgaaggcgcgctgaagctgccggaactgaagcgcccggcagtacccacggtgccgggaagcctgcacgtggccgccttcaacctggagaatttcttcaatggtgacggccagggcggtggcttcccgacgctgcgcggcgcgcgcacgctggacgagcacaaggcgcagctcgccaagctggtcaccacggtcaatgcgctgggcgccgatgtcgctgcgctgatggaactggagaacgacggctacggcccgcagtcggccatcgccgaactggtcgatgcgctcaaccgcgaccgcggcgcgcagggcgactggcgcttcgtcgacgccggcaacggccccggcgacaacccgatccgggtcgggatcatctaccgaagcacgcgcctgcagccggtcggcaagccggccacgctgaccggcggcccgttcgtcgagcacagccgcgtaccgttggcgcaggccttccagggcaagcagggggcgccgttcgtggtggttgccaaccatttcaaatcgaagggttgccgtgacgcggccggtgccgacgccgatcgcaacgacaatcagggctgctggaacgccacccgtgtgacgtcggcgcagcagctgcacgcctggctgcagaccgatccgaccggtaccggcgccagggacgcggtgctgctgggtgacttcaatgcctacgcgatggaagacccgatccgcgccctgcatgatctgggctggcaggacgcgttcaaggttgccaaggtcgagcatccctacagctacgtctacaacggctacaccggccgcctcgaccacgcgctgctgaacccgggcatggccaggcgcctgcgcggtgccgccgaatggcacagcaacgccgacgagcaggacgccagcggctaccagggccgcaacgtgcagggcccgtggcgcagctccgaccacgacccgctgctgctgggcttcgacaagtaacgcgccaggccggggtcggatcccattcccacggaatgggctctgacccaaggcatcgcggggtctgaggcgtaggggtcagagcccattccgtgggaatgggatccgaccccgggtatcgctcacccccaggcgatcatcccgatcgccagcaccgccagcgccagtcccgcgcggttccacttcgtggtggcctcgccgaagacgaacatgcctaccagcgcgcccagcaccaccacgccgatgttcatgccggcgaacacggtggccgggctctctggcatcgcctggtgcgcatgcacatagaacaggatgttgccgccattgagcaggcccagcagtgcacccgcgccgaggttgcgccaggccagtcggctgcggccactgacatgccgccacagctgcattgccagcatcagcacgaaggcgacgctgaaactggccagcaccgccgccatcgacggcgtgccggacagcgccacctgcttgagcagcacgtccaccactgcgaatccggcccatacgcccagcagccagccccagccgccgggtgaggacgccaccgccgggccgcgcgggcgcaggctgatggccaccatcgccagcaggcccaggcccaggccggccagtttccagggcgttgcggtctggccgaagcacaggaaggcggcggccagggaaagcagcaacgacagccgctgcgccacgtcgctgcggacgatgccggccaccgccaccgcgcggcccagtaccaggaagatcgagggcagcaccaccgccagcgccagcagtgacagccacggcgcatgcggcgcgcgcagcgcatccagcggtggctgcagcaccacggcggtgagcgttgccgccaccagatagttccaggtgaccatctgcgcaacatccagcgggcggcgtgcggccaccttcaacaacaccgaaaccagcacactgcagatcacggccagtgacagatagagcatggggcgggcacagggcaggggcgggggacggtatcatggtgccatgcacaagcccttgttccccgtcgcccccggcgaaaccgcctgcctcgaactggacggcccggccggcccgctggaagtggtcgtcgacctgcccaaggccgatgtgccggtgcagccgatcgtggccatcgtctgccatccgctgtccaccgaaggtggcaccctgcacaacaaggtggtcaccatgaccgcctccaccctgcgcgagctgggcatcgccacggtgcgcttcaacttccgcagcgtgggtggttcggctggcaccttcgatggcggcgtgggcgagcaggatgacctgaaggccgtcgcggcctgggtgcgcagccagcgcccggatgaccgcctgtggctggccggtttcagcttcggtgcgttcgtgtcgctgaaggccgccgccacgctgcagccggaagcgctgatctcgatcgcgccgccggccggtcgctgggatttcgacggcatcgcgccgccggcgcgctggctggtgatccagggcgagcaggacgagatcgtcgacccgcaggccgtctaccagtggctggacacgctggacgccccgcatgagctggtacgcatgcccgagaccagccacttcttccaccgcaagctgatcgacctgcgcggcgcgctgacccacggcgtcaagcactggctgggcgcggcggcatgagtgcacccgagctgaccccgtcgcagcggtatgcggaaggggttgcccgtggcgactggcagaacgatccggcccagcatgcggcgctggccgagctggaccgcatccacctgggcctgctggacagtgccgaggatggctggctggaccgcctgtcttcgttctggaagaagcccgagccgatcaagggcctgtacttctggggcggcgtcggccgtggcaagaccttcctggtcgacctgttctacgacgggctgccgatcaagcagaagtaccgcacccatttccaccgcttcatgcgcagcgtccatgagcgcctgcgcgagcaccagggccagagcgacccgctggcgaagatcgcccaggaatggcgcagcaacctgcgcgtgctggtgctggacgagttcttcgtcaccgacatcggcgatgcgatgctgctggcgcggctgctcgagcgcctgttcgccgagggcgtgaccctggtcaccacctccaacaccgcagtggagaacctgtacctcaacggcctgcagcgcgagagcttcctgccggccatcggcctgctgcagcgcttctgcgtggagctgtacgccgaaggtaccgaggattaccggatgcgcgcgctgacccgctcgccggtataccgcgcaccgctggcggccgacagcgatcagtggctggccacgcgctggaacgagttgagtggcggccagccggccaaggccggcaacatagagatcgagggccgcaagattccggtacgcggccgtggcaagagcattgtctggttcgatttcgccgcgctgtgcgaaggcccgcgcgggccctcggattacatcgagatcgcgcacgagttcaacacggtgctgctgggcggcattcccgccttcgaccgcttgaatgaggatgccgcgcgccgcttcgtcaacctgatcgacgagctgtacgaccgccacgtcaacctggtctgcaccgccagcacttcgccgatcgagctgtacaccggccagcgcctgcagggcgcgttcgaacgcaccgcctcgcgcctgatcgagatgcagagcgccgagtacctgggtaccccgcaccgggcgtgagggcggtttactgtagagccgagcccacgctcggctgcttctggatgatgtgccgaaagggagccgagcatgggctcggctctacagcagcgccgcgcagctatcgggaaggcgccaccgcattcccacgcggccgctcatccggcccggccggcacctgcaggcccgagccatcgccgtgctccacccgaacgctctcgctgcgctccagcagccgcagcggttggccttggtagcgcacttccagcgcgtcatgagtgtcggccagcgactgcaccagcgggcacagcgattgtgcttgggcctcgatgcgttcggcgcggccttccagctgctgttccatctgcgcgtccagacggtcggcgcgtgcctccatcgcatcgctgcgtccggtgaagatctgccacagcatgctgcgggcgatggaggcggacagcgactcggccatgtcctgcaccttggcctcgaagcctggcccgaacacagcctgttcccagtagcccttgcccagcgtgccgccgatccagtcatcggcctgccggcgcaggcgccggaccttgcggctgttggcggtaccggtgaggctttcatagaccccgtcgagcacgtcgaagctcagtccgctcacttcatgggccagcgccgtggcggccggcatcagctgccgtgccccggcctccatctgccgaaggcgggccgcgtcggcctcgctgaccggcacgaccgtgtcgtccaggctcagcacgccatcgtggaacaccacctcgtgcggtgcctgcgggccatgccgcagccagatgccaccgctgtccaccagcacgtcatagtcggtgtggataccgcactggtccgcgcgcagcttcggggtgtcagcggcaattgcaggtacggtgaccacagcagccaacagggccaaggcgggtgctgacaggcgcatggtggaatcctttccggtcattgcaggaccccagcatcccgcgttcggcaggcgccgtcacccgccgaaagtcactgcgcgatggcgattcgtccggccataccggctttcccaccggctgcccaccacctatccacagggttgtccctagccagtttcatcactgtcatgtgaagctgtcattgttccgttttcgcggtgcgttgtgccaccgcaatgacgcctttcggacttgactgcgcagcccgttccggcaggtctgaagcgtctgatcagggcgccgatggcacgatccttgcggcgcaagggattgccgaatttcactacatttggcgttgacggaccccattacccccactatcttgtggccgtcggtcgcagcaacccccattccaggggttgccccggggtacccatccgcgatcgtcaacggcagtggcaggcgcagggtctcatcccctgcgacgccgtcctgccatcctgggctgtcatgtcccgggccgcgtcacccgatgcatcgagcacccccaaatcacgccaagaggacacacgccgtgagcaccgaatccagcgccaccatcgagaaggaaagcgaattcctgttgacgtcgccgccgacggccaacgcgatgagtgtgaccaagcgcaatgggaccaccgaactggtggacctgaacaagatcgtgcgtgcggtgcagcgttcctccgaaggcctgcacgccgtcgacccgatgcgcgtggccacccgcaccatttccggcctgtacaacggtgccaccacccgcgagctggacgaactgtccatccgcaccgccgccctgctgatcggtgaagagcccgagtacggccgtctcgccgcgcgcctgctggccaactacatcgccaaggaagtctcgggccaggaaatctacgccttctcgcagtcggtcagccgtggccatgaagtcggcctgatcaacgaccgcctgctgaacttcgtgcagaccaacgcacgcaagctcaacgatgccatcgacatctcgctggacctgaacttcgattacttcggcctgcgtaccctgtacgaccgttacctgctgcgccacccgcacacccgcaaggtgatcgagaccccgcagcagttcttcctgcgcatcgccagcgcgctgagcgaggacgtgtccgagaccctggcgctgtacaagcgcatgggcaacctggactacctgccgtccagcccgaccctgttcaattccggcaccacccacgagcagctgtcctcgtgcttcctgctggactcgccgcaggactcgctggaatcgatctattccaagtacggcgacatcgcccagctgtcgaagttctccggcggcatcggcgtcagctacacccgcgtgcgttcgcgtggttcgctgatcaagtcgaccaacggccattccaacggcatcgtgccgtggctgaagaccatggattcgtcggtggccgcagtgaaccagggcggcaagcgcaagggcgcggcctgcgtgtacctggaaacctggcacgccgacatcgaggacttcctcgagctgcgcgacaacaccggtgacgaagcccgtcgtgcgcacaacctgaacctggccaactgggtgccggacctgttcatgaagcgcgtcgaagccgaccaggaatggtcgctgttcgatccgcgcgtcgtgccggagttcaccgacctgttcggcgaagccttcgagcaggcctacctgcaggccgaagcccagggcaaggccaaccgcaccatctccgcgcgcaagctgtatgcccgcatgatgcgtacgctggccgagaccggcaacggctggatgaccttcaaggacaagtgcaaccgcgccagcaaccagaccctgcgcccgggcaacgtgatccacctgtccaacctgtgcaccgaaatcctggaagtcacttccaacgatgaaaccgccgtgtgcaacctgggttcgatcaacctgggcaaccacttcgacgagcacaacgagttcgacttcgagaagctggccgagaccgttcgcctggccgtgcgccagctcgaccgcgtcatcgacctgaacttctacccgatcgaaaccgcccgccgcgccaacctgcgctggcgtccggtcggcctgggctgcatgggcctgcaggacgtgttcttccgcaagcgcctgccgttcgacagcgccgaagcccgcgccctgtcgaagaagattgccgaagcgatctacttccacgcgctggaaacctcctgcgagctggcccaggaacgtggcaagcacccgtcgttcaacgacacccgtgccgccggtggcgaactgcagttcgacgcctggaacgtggtgccggaagacaccgcgcgctgggatgccctgcgcgcccgcatcaaggaacacggcctgcgcaactcgctgatgatcgcgatcgccccgaccgcgaccatcgcctcgatcgccggctgctacgagtgcgtcgagccgcaggtgtccaacctgttcaagcgcgagaccctgtccggtgacttcctgcaggtcaaccgttacctggtcaacgagctgaagaagctgggcctgtggaccgccgacatgcgcgatgccatcaagctggccgaaggctccatcgccggcgtggcgcagattccggaaacgctgcgcgaggtctaccgcaccgcgtgggaactgccgatgcgttcgctgatcgacatggccgccgagcgtggcgccttcatcgaccagtcggcctcgctcaacctgttcatggaaagcccgaacatcggcgcgatgtcctccatgtacatgtacgcctggaagcagggcatcaagaccacctactacctgcgttcgcgcccggccaccaagatcgccaagaccacggtcagcgctgcggccccggccaaggtgttcagcccggacgaagccatcgcctgctcgctggaaaacccggaagcctgcgaggcctgccagtaagacaccgcgcggtgggtgccgaccgttggtcggcactcgaacacctcgcacctgtagagccgagccatgctcggctgcggaaaaacacccacggtagcgccgggccacgcccggcggctcacccaggaattcaaggaaacacccatggccgacaagcccaagcagatgctgctcgatcccggttttgaactgaccctgcgcccgatgcgctacccgcagttctatgacatgtaccggaatgcgatcaagaacacctggacggtggaagagatcaacttccagatcgacatcaccgacctgcacagcaagatgtcgccgggtgagcgccacctgatccaccgcctggtcgcgttcttcgccaccggcgattcgatcgtgtccaacaacctggtgctgaacctgtaccagcacttgaatgcgcccgaagcgcgcatgtacctgtcgcgccagctgtatgaggaagcactgcacgtgcagttctacctgaccctgctggacaactacctgccggatccggaagagcgcgccaaggcgttctcggcggtggagaacatcgactcgatcaagaagaaggccgatttctgcttcaagtggatcgactcgatccaggacctgacccgcatcgagacccgcgaacagcgccgccagttcctgctcaaccagatctgctttgccgcctgcatcgaaggcctgttcttcttcgctgcgttcgcctacgtgtactacttccgttcgcgcggcctgctgccgggcctcgcctcgggcaccaactgggtgttccgcgacgagagcgcgcacatggagtttgcgttcgagtcggtgcgcgtggtgcgtgaggaagagccggacctgttcgacgacgagatgaagcagcaggtctacgacatgctggccgaagccatcgaatgcgaagtgcagttcgccgaggacgtgttgtccggtggcgtggccggcatctcgacccgcgacatgcgccagtacctgcagcactgcgccgaccagcacttcgccaagctgggcatggaaaagaagtacaacgtgcgcaacccgctgccgttcatggaactgcaggacgtgcaggagctgaccaacttcttcgaacgccgcgtctcggcctaccaggtcggcgttcagggcgaagtcgccttcgacatgaacttctgatcgaaccggccaggcctgtcgcaacgaagaaccccggccaatgccggggtttcttgtttccgtagcgtcgagccatgctcgactgctgttcgcaagaaagtcgagcatggctcgactctacaatcagcgccgcccttccaccgccatgcgcaccgccagcccggccagcaccgtgcccatcagccagcgctgcaccatctgccaggtggggcgcgcggccaggaagccggcgatgctgccggcggtcagcgcgatcatgccgttcacgctgacgctgaccaggatctgggtggagcccagcacgatcgactgcatcagcacgctgccttcgccgtccgggtgcaggaactgcggcagcagcgacaggtacatcaccgcgaccttcgggttcagcagattggtcaggaagcccatcgtgaacagcttgcgcgggctgtcctgcggcaggtcgcgcaccgcgaacggcgaacggccgccgggcctgagcgcctgccaggccaggtacagcaggtacagcgcgccgccgatgcgcagcgcgtcgtaggcgaacggcacggtcatcagcagggcggtgatgcccagtgccgcacacagcatgtagaacacaaagcccagcgccaccccgcccagcgagatcaggccagccatcggcccctggcagatcgagcgcgagatgacgtagatcatgttcggcccgggcgtgagcaccatggccagcgaaaccagcgcgaaggccagcaggtcggaagtggcgggcatgggcagtcctggcagtgggcgtggcgcagtgtaacgcctgccgcaggcgcggcctgcgcaggcaccgctgccgggtgcctgttgcacgtgcatgccgatggccatcacgccggtcgcttagaatccgcagcaccccacaccgaagcacccccatgaccccgatccccgagaccgtgccgcccaccgaagtgcgcatggctgaaatcgtcttccccaaccacaccaaccacctgggcaccctgttcggtggccaggcattggcatggatggacaaggccgcgttcctggccgccgcccgctattcgcgccgcaccgtggtgaccgcgcgcagcgaccaggtcgacttcaagctgccgatccgcatcggccagatggtggaaaccatcggccgcatcgtcgaagtcggccgcagctcgatgaaggtcgaggtggagctggtcgccgaggacctgcacagcggcgagcgcaagctgtgcacccgcggccacttcgtgatgatcgcgctggacgaggaaggccacccgatcgcggtgccgccgctgccggccgcctgagaccagcggctgaaccggtgcttgcgggggcgctgcggcgcccccatctggcagccatgaccccgccactgaccgacttcatcgaccgcgccgagcgcctgttcgtgctgaccggcgcgggttgcagcaccgcctcgggcatacccgattaccgggatgccgacggccagtggaaacgcacgccgccggtgacctaccaggccttcatgggcgaggcgaccacccgccagcgttactgggcgcgcagcctgctgggctggccgcgcttcggcctggcccggcccaacggcacccaccaggccctggccgccctggaaagccgcggcaagctgcaggtgctgctgacccagaacgtggacggcctgcaccagcgcgccggcagccgcaacgtgatcgacctgcatggccgcctggatctggtgcgctgcatgggctgcgagcgccgcagtggccgcgaggatttccagcagcggctgctggacgccaatcccggctgggacgcgctggaggccggcatcgcccccgacggtgatgccgacctggagaccgatttctccacattcgtggtgcccgattgcccgcactgcggcggcgtgctgaagccggacgtggtgttcttcggcgagaacgtgccgcgcgagcgggtggcggcggtgcacgatcatctgcagcaggccgatgcagtgctggtggtgggctcgtcactgatggtctattccggcttccgcttcgtgcaggcggcggcgaaggcagggttgccggtggcggcgctgaaccgcggccgcacccgtgccgacgacctgctgttgttcaaggatgagcgggactgcgctgaagccttgtccggttgggtggcgggctgagccgagcgtgggctcggctctacgaggggctgttcggcgctcggcggcatgatcggctgcgaaacagcgatccatccagacggttgatccagaagccgcgcagcggtgcaatacgcaccccctacgtcgttcatcacccccttgagccagctgttttcgccgatctcgttcggccccctgaccctgtccaaccgcatcgtcatcgcgccgatgtgccagtactccgccgaagacggccgcgccagcgactggcacgccatgcacctgggcaacctggcgcagtccggcgccggcctgttgatcctggaagccaccgcggtcgagccgcgcggccgcatcagctgggccgaccttggcctgtgggatgacggcaccgaggccgcgctggcacaggtgctggccagcgtccgccgctggtcgccgatgccgctgggcatccagctgggccatgccggccgcaaggcatccaccgcccgtccgtgggacgggggtggccagttgccggccggcgatgcgcgtggctgggccaccgtggcgccgtcgccgctgccgttccatgccgccgatccggcaccgcaggaactggacgaggccggcatcgccgaggtcatcgccgccttcgctgccagtgcggtgcgcgccgagcgcctgggcttcgagctgatcgagctgcatgccgcgcacggttacctgctgcaccagttcctgtcgccgctgagcaaccgccgcaccgatggctacggtgggtcgctgccgaaccgcctgcgcctgctggtggaagtgttcgacgcggtacgcgcggcggtgtccgacaaggtcgccgtgggcgtgcgcatttccgccagcgactgggtcgagggcggctgggatctggtgcagagcgaagcgctggcccaggtgctggacgcgcgcggctgcaatttcctgcatgtctccagtggcggcctggacgagcgccagaagatcaccgtcggtccgggctaccaggtgccgttcgcggcggcgatcaaggccaaggtgcgcatgccggtgatcgccgtgggcatgatcaccgaaccggagcaggccgaatcgatcctgcgccatcgccacgccgatgccgtggccctggcgcgcggcatcctctacgacccgcgctggccgtggcatgccgccgccgcattgcgcgacagcgtggaaccggcgccgcagtacctgcgctgcgagccgcgcgatgcgcgcggcgtgttcaaggcgcgctgaggttcacacccgccatgccggcgccatgccggcctgcaggtgctcgaacagcgcgcggatcttggcggtgaagtcgcggcgatcgctgacgcagaaatagacctccatcggctccggacgccacgtgctgtcggcgccgaacacggcctgcaggcgtccatcgcgcaggtagggctcggccacgaacgcagccaatcgcgtgatgccggcaccggccgccgccagcgacgccagcgcatcgatgtcatcgcagaccatgctcggcggtagcacggcgtccacacgctggccgtccttcagcaggccccagcgcaacggccggccatcggtggggaagcggtgcagcagcccgcgatggctgcccagatccgatggttcctgcggggtgccatgggccttcaggtaggccggcgaggcgcagaacacgaacggcacgcgtgccagctgccgtgcgaccacgccgtcttccagctgcgcgccgatgcggatgctggcatccaccgcctctggaccatgctgcacggcgcggtcggtcagccgcagttccagctgcagctgcgggtagcgttgctgcagtgacggcagcaacggggccagcacgtggcggccgaacgcgctgctgctggcgatgcgcagcggcccggccggttcgatatcaccggaggtgaccatcgcctgcgcgcgcgccaggtcggcctcgatgtggcggacctgcgccaggtacagcgcgccggcctcgctgagcgccagctggcgcgtactccggttcagcagccgtacgcccagatgcgcttccagccggttgatgttctggccgactgcggtggcgctgatgccaaggatgcgggccgcggcggcaatgctgccggtctctgcggtgcgggtgaagctgcggatcagttgcaacaggttcatgaccgaccagcttgccacggtgatggccaagtatcgcttgggactgaaccaagcggttcggttgcatcggtgatcatccggctgctgggcaggaagctgccctacactgtggcgatgcgccccgattccatcctcaccctgtcctgccccgaccgtaccggcatcgtctaccgcgtgtccggcctactgttcgaccacggctgcaacatcctcgacgcccagcagttcggcgatgaggaaagcggccgcttcttcctgcgcgtgcatttcgaccgtgacgccggcctgccgctggagaccgtgcacgccgcgatggccacgcttgccgaaggcttcggcatggactggcagctgcatgatggccgccgccgggcacgcctgctggtgctggtcagcaagcaggggcactgcctcaacgacctgctgttccgcgcccacagcggccagctgaaggtcgacattgccgcggtggcctccaaccacgtcgacttcgcgccattggccgcgtcctaccaggtaccgttccaccacctgccggtgaccgccgatacgcgtgcggtgcaggagcagcagatcatcgacctagtcgagcgcgagcgcatcgacctggtggtgctggcacgctacatgcagatcctgtcacccgcgctgtgccgcgcgctggccgggcgtgcgatcaacatccaccacagcttcctgcccagcttcaagggcgcgcagccgtaccaccaggcacacgcgcgcggggtcaagatcatcggcgccaccgcgcactacgtcaccgaggatctggacgaaggaccgatcatcgaacaggacgtggcccgcgtggatcacgccatggcgccgcgcgagctggtgcggctgggcagcgataccgaatcgctggtgctggcacgcgccgtgcgccgccatgtggagcaccgcatcctgctcaacgggcatcgcacggtggtgttccggtaacgtgctgccccttccaggtccgccgggcatggcccggcgctaccaagggtgctatccggtagtgccggccgctggccggcaactgcatggatcccgaggttgccggccagcggccggcactaccgttgtgggtcaggcggtcgcgattcccgccttgcccagcgcatcgcgcaccatcgcgtcgttggcttcggtcaccggccgggtcaggtcccacaggaacttcacccggaagccggacttcaccgcatcctgcgcgctccacagcacgcagtagtcgcgggccaggccgcacacgtgcacttcgcggatgcggcgctcgtgcagccagccggccaggccggtggccgggcgctcgccatcggggccatggttctcgcggaaggcgctgtacgaatccacctgttggcgcgtgcccttgcgcaggatcaggtcggccacggtccagtccacgcccgggtgcagcgcggcaccggcgctgccctgcacgcagtggtccggccacagggtctgcggctgcgcgtgcagcaggatggtctcgaacgggcgttggccggggtgctggctggcgaacgaggcatggtcggccgggtgccagtcctgtgttgccaccacggtgcggtagcggcgctgcgccagcagatcggcgatcggtgccaccagcgcatcgccctggtcgcaggccaaggcgccaccgggcatgaagtccggctgcaggtcgatcaccagcagggcgacatcggcgggcagggcggtcatggcagttccgctacaacagaaggggcgaccagcgtggccgccccatgcctgcacgtcaatcgtcctgtggcgtcccagcgtcccgcccgtagtacagcaggccgatcctgatccgctcgcggccattctcgcggcgatggcggttggcatcgcgcagcgagtacacgcagccgcagtattcctgctggtagaactgctcgcgcttgctgatctcgatcatgcggctggcgccgccgcccttgcgccagttgtagtcccagtactgcaggccttcatagcgcgacgccgcacggatcccgcagtcgttgatctgcgccatgttcttccagcgcgagatgcccagcgacgaactgatggtgtcgtagccgtgctcgtgcgcgtacagcgcagtgcgctcgaagcgcatgtcgaagcacatcgtgcagcggatgccgcgttcaggctcgttttccatgccgcgtgcacggctgaaccagttgtcggtgtcgtagtcgcagtcgatgaagggaatgccgtgctgctcggcgaagcggatgttctcctgcttgcgcagctcgtactccttcaccgggtggatgttggggttgtagaagaagatcgcgtagtcgatcccggaggcggtgatcgcctccatcacttcgccggaacagggcgcgcagcacgaatgcagcagcaggcgcttgccgtcggcgggcagggtcagggtggggcgttggagctcggtcatcgtcaggtaccgcatggaccgccggcaacggcggtggcccatgcatcagcgcgtgggtgaacgggtctggccggataccgtgaacaggacgcgcgcggccacaccgcctgcacgcgcaggacgacgacggccccggcaacctccccgcggagattccaggtcgagtcaggggacggtcgtgtcccccggccggggccggtattcgggctgatggacacgggccgcagcccacctactacccgccgcttcccaggcgcgcgcccagtgctgttggcaggattcgtttccattcaccgctgcggggcagctccggaatggacgcgcgaggcgccttcaccggattcccgtttaaatccctccccgcgccgcagcgatgggagggataccttcggcgtgtgcaaggtggacctgttggtggcgccggtcaagagcgcaggggtcagaacccgctgcgtggcagcgggatccgcccccagcggaaggaaggggtcggatcccgctgccacgcagcgggctctgaccccggtcgggatgcaccttcaatgccccacggccgcccgcgtgcggatgtcgtccagccgctggtcgtgcagcaggcggccgttctcccacacggtcaccattgcgtcctcgaagccgtccggcagggtgtcgtcgccgttggccggcagcggcaccgtgtgcaggctgccatcgtccaggcggcgcagcaggcgcatgcggccacgcttgctggccttgccggcgtcggtgaccggatccttgtagacgtcgatccactcaccctcgaccctcgccgccgagcacttcagtgcgaacttctgcgtatcgcggtccagccgctgcagcagcgcaccgcccatgccgaaggccacgttgtcggcggcgtagccgtcgtcggtgatgcgttgcaggatggtgcggatggtatccgggttgatgccatcgccctggatcacccgcacgtggttgagcacgcggtagcccttgctgttgagggtgtggccgaaggcttcatccagccggcgcaggctttcggccaccacctccaccgggtcccccgagtccgggcggatgaccagggtggcgcccgaggcgatcacgtcatcgcgcagggtggtaccccagtgctcgctgatggcgcggtagatgtcatagctgtccgacaccacggctacgatcgcaccgggcgtgccgaactggcgcagcatgttgcggtaggcgtccacctcgcgctcgcggccccagctggtgatggtgctgtgctcggcggcgggaatcgaatagccggccatcggcgcgtggtagtgcgcgcgcgccaggcacagggccgagaccgtatcggtgccgaggaagttgaccaggtgcgcggcaccgcccagcgcggccgattccaggctcgagacaccgcgcgcgccgaagtcatgcagcttgaacggcagctgcccctgcgggtcgtcgctggtctgctgcaggaacgcggcgatggtctgccgtgcgtgccagctgatggtggccacggtgaccgggtaccacacgcgcagcagcagcgtttccaggtacgacggcacccagaacgcggccggatcggtcgattcgatggtcatcagcgcctggtgggtgggcaccacgctgccctcgggaacggcgcggatgcgcaccggcaggtggccgccaagccggtcgacgatatcgcgccagccggcctcgttgaacggttcgccatgcgcggcgaacaccgcagcagcgtcgtcgatgtcggcgtgggtgaccggccgtgccagcgcgcccttgaggatcgcctgcaggccgaagaacaccgtgcgatcgtgcaggccgccacgtgattcgacgtagaagaacgtggcatcggtacccggcgggtactgcagccaatggctggccttgtagctgtcggtgttgaggagaagattatcgaggtagtgcatgacggaagctccttcgcgtcgggtggcaccagcggtctatccgccagtgggaaagccgggccggtcagccgcggccgaggaaatactccaggatgtgcaggtggtcttcgaacagctgcgggcccatgtccagtgcttcactcaccggtatccagcgtgccttgtcggcgtcatcgccaccgcgcaccggcggcagctcgccggccggaaactcgaagtggaaaccgtgggtgatggtgcggccacgctggctgcggtccgggtggtcgaacacctgctggcccttcagcgaccccttcaacaccggcaacggaatcttcagccgggtttcctcgcgcagttcgcgcaggcagctgtcgagcaggctctgttcctggccgacgaagccgccgggcaatgcccacagccccttgccgggttccgagcggcgacgcaccagcagcacgtggcccgaatgcaccaccaccgcatcggtggtgacgaaggtgggcgcgtagggtgcatccttccaggcggccttgtactgttcgatgaagcggtactcggccaccagctggccatacgcaggcgcactcttgcggaacgcttcgagcatgtcgtacaccggcgccggcacattgccacgcagcatcagcagcgcgccgtggaagtcgacgtcgcccgcttcgaacaggtagcgccgcagctcggtggccgacagggtggcagtgtgctgcacgtccaccagcggccactgcgggaactcgcgcaggtagtagctggacgcatccttgtccatgccgatcaggcccaccctggcatcggcggcggcaccgtcgttgcgcagggcgtcagccacctggcgctgcacgttggcgatccattgtgcttcgttgtacaggtggtcacgcagcgggcggatcagcagacggtcggtgtggccgtcgagggccgcctggatcatcacggcgcgttcggccacggtccagggattgcggaggctgcggggggtatcggcagagccgaccaggaagatcagcttgcgggcccggctcagggccaggcgggcaacggcggcgtggccgttgtggaagggctcgaatcgcccgatgaagacgagatagtcgaattccatgagaatccctcatgtcgttgtggcagccgcgggtctgtcccttggcttgctgcagatgctacgccgatggcggggcgggtcaagcctgcagccgtgctttctgctgaacggcgcattgcgtgcgcggactgcgccgttgttctcaggccctgagaagcccctgcgccatactgcaacccacgcggcggacggcatgctcgggggcaagacagtggcggacaagtactgcgatctggtcatgaaaggcggcatcaccagcggcatcgtgtaccccaatgcggtactggcgctggcccgcgagtatcgcttcaagagcatcggcggcacttcagccggcgccattgcggcagcggtggcggctgcagcggcctgcggcgatcgccgccagcaggccggcgagcagctgcccggcgatgcaggctatggcgggctgtcggcggtgtcggcacagctgtcccggcgcggcttcatctacagcctgttccagccggcgcgcggcgcgcgcgcggcctatcggctgctggtggtgctgaccggcaatgcccgcctgccgcacaaactgctgtgcctggccgttgcggtattcgagatcgcgccgctggaagtgctggtgtcgctggcgctgctgctcggcctgggctggtggggcggtggctggagcggcgtggccgccacgctgctgccatcactgctgtgcgcctacggtgcgggtgtggccggtgccgcgctgcgggtcgcgcgggtggcgcgtcgcaacctgctgggcctgtgcagcggcctcagccgcgatccacgcaggccggcgctgaccgagtggttgcatgaatgcctgcagcagctgtcgggcaagccgctggatgcaccgttgaccttcgccgacctgcacgatgcgccgcgctacgccggtgagccggacagcccgcatgcgatcagcctgcagatgatcaccacctgcatctcacacaacgagccgcgcacgctgccgctgggcggtgcgcagttctggttcctgcgcgaggagttcgagcagctgttccccgccagcgtggtgcagtggctggtgagccaggccggcccgccgctggaggtggaagggcggcagtactaccacctgccacagggcccgaagttgccggtgctggtggccacgcgcatgagcctgagcttcccgctgctgatcagcgcggtgccgctgcatgaaccctcacgccgcgaacgacgctgcgaaccgaccgcccctgcggccgaccaggagcacaacgttgccgacagcatggaagggctgaccagtgccgggcagacctgcggcccggtgatcatcgccttccgcatctgctggttctccgatggcggcatcagcagcaacttcccgatccatctgttcgacgccgccctgccgcgctggccgaccttcgccatcaacctggtttatccacagcacgccgaagcggtgagccagggcagcggcggccgccaggcgctggaacatgcggtgttcctgcccaccgaaaaccgccacggctggcaacggcattaccagtccatcgccacgccactggccgcagccgagctgggtcgtttcctgttcgcggtggtggcgaccatgcagaactggcgcgacctgctgcaggcgcgcgcaccgggttatcgcgaccgcatcgtgcacgtcagcctgcagggcgacgaaggcggcatgaacctggacatgccgcaggaggtactctcccgcatcgccgacaagggcagcctggccggtgcgcgcttctgttcgttctcgttcgagaaccactactggatccgctggcgcaacctggcctcggcctaccagcgttacacgctggaagtggcgcgcaccgatgatccggcgcagcaggtgctggcctaccgcgcggcgtacgcgatggtcgccagcggtcagccgacgccaccgtcgtacaagctgggctcggaagacaaacggctggcctcgcagcagttgtggggcttgatggtcgagcagggccgcacctgggaggacctcggcccggaccttaccgacggcgcaccgcgtccgctgccgcagatgaaggtgaccccgatctactgacccgatcctgcggtcgaatcggggtcagatccgtttccgcaggaaaacggatctgaccccgcagtggttgctgctcttgccggccagcggccggcactaccgcaggtgcagggcgcagccctgcagaaccccctatcgccccggcaactgcgcgaacgcgcgctgcatgcagtcctcgcgcgggcacacccggcaccccgggccgatcgataccgaattgcccgggctctgcacatccagccccagtgaatacaccaggcgttcggcatgctgcaggtcgcagcccagcgccaccgcgaaggtcttgcgcggttggccatggccgaccgggccactgctgacctgccgcgccagccagaaatgacggcggccatcgggcatgcgcgcggtctgggtgaggatgcgcccgggttggttgaacgcctcgtagacgatccacagcgggcacgatccacccacctgcgagaagtggaaatcggtggccgaatggcgctttgagacgttgcccgcccgatccacgcggatgaagaagaacggcaggccgggcgcgctgcgccgtgccagcgtgctcagccggtggcagaccgcttcgaagccgacgccgaactggtgcgccagcagttcgatgtcgtagctgctggtttcggctgcacgcaggaagcgcatgtacggcatcaccagcgcaccggcgaaatagttggagagaccgatccgcgcctgcgcgatgcgtgcctcatcggtgaacccggcgcgcgccaccaccgcatcgatctgcggcaggtagccgtgcagggccagctcggccgccatctggaacgcctgctgtccgggctctaggtaatcgggcagccacagccgccgcgcaccggcatcgtagtgccgcttttcgcgcccggcctgcagtgcggccacttccaccagcacgccatggcggtcggccagcagctggcgcagccgcggtgccacatgcccgggcgacagcccccattcggcgaacagctgctcggccagctcgtccagctcgggaatgtggttgtgcatgcggttgaagaactcgcgcacctggtcaccggcgggcagggtactgccggcgccgggctcgcccagctggaactccagtgcggccgcgtgctcgcgcagcgccaggtgacgacggtgcaggtccaacagcgcgcggctgacctgcggcaggttcccggccagcgcgcgcagttcggtcgcgctgacctcggccaggcccaggtcgcgcagggtttcgcccagcgcctcctgcagggcggcgggctcatcgtcatcgaacagcgaggaaacgtcgcccagcacctctcccagcttcttctgcaccgccggtgtcagtgggcgcttgttgcgctcgatctggttcaggtagctggccgacagccccagcgcacgcgccagatcggcctggctgtagccgcgctgctcgcgcagccgcagcaggcgcaggccgagttgccgctggggagctgaataattcacagaattaacaggaaccgtggggcgtgttggccagattaagcggattcagcccggaaatcgagccgggtgctgtgaataatgccaagcatctttcgcaccctgtgggattgtcgtcatgactgttgcagcgccccgtatccgcatgctgatcgatggccagttcgttgaatcggccacttcccactggcaggacgtgatcaatccggccacccaggacgtgctggcccaggtgccgttcgccaccaccggcgaagtggacgccgccgttgccgccgccaaggaagccttcaagacctggcgcaagaccccgatcggcacccgcgcgcgcatcttcctgaagtaccagcagctgatccgcgaaaacatgagtgagctggcccacatcctcaccgccgaacagggcaagaccctgccggacgccgaaggtgatgtgttccgcggcctggaagtggtcgagcacgccgccgccatcggcaacctgcagctgggcgagctggccaacaacgtggccaatggcgtggacacctacacgatcatgcagccgctgggcgtgtgcgccggcatcaccccgttcaacttcccggcgatgatcccgctgtggatgttcccgatggcgattgcaacgggcaacaccttcatcctcaagccgtccgagcaggacccgatggtcaccatgcgcctggtcgagctggcgctggaagccggcattcccaagggcgtgctgaacgtcgtccacggcggcgaggaagtggtcaacgcgatctgcgaccacccggacatcaaggccgtgtcgttcgtcgggtccacccgcgtcggcacccacgtctacaaccgcgcttcgctggccggcaagcgcgtgcaatgcatgatgggcgccaagaaccacgccgtggtgctgccggacgccaacaaggaacagaccctcaacgcaatggtcggtgccgccttcggtgccgctggccagcgctgcatggcggcttccacgctggtgctggtcggtgaagcgcgcaactgggtgcaggacctggtggccaaggcccagaccctgaaggtcagcgccggcaccgtgtccggcaccgacgtcggcccggtcatttcctgcagcgcccgcgagcgcgtggaaggcctgatcgcctcgggcgtggagcagggcgccaagctggtgctcgatggccgcaagccgcaggtcgatggcttcgagaagggcaacttcgtcggcccgaccatctttgccggtgtcaccaccgacatgcgcatctaccaggaagagatcttcgggccggtgctggtcatcctcgaagcggaaacgctggaagaggccatcgcgatggtcaacagcaacccgaacggcaacggcaccgcactgttcacccagtccggcgctgccgcgcgcaagttccaggaagacatcgacgtcggccaggtcggcatcaacgtgccgatcccggtgccggtgccgctgttctcgttcaccggttcgcgcgcctccaagctgggcgacctgggcccgtacggcaagcaggtggtgctgttctacacccagaccaagacggtcaccgcgcgctggttcgatgacgagacgctgagccacggcgtcaacaccacgatcagcctgaagtaacggcaggagcagccatgagccactcgatgacgacggaactggaagaagcgcagcaggcgtaccgcgaggcggcgcgcgacttcgcacaggccgaactggcgccgcacgccgcgcgatgggatgcggagggcatctttccgcgcgaggcgatcgccaaggccggtgagttgggcttctgcggtctgtacatggacccggaagtgggcggcagcggcctgagccgactggacgccgccgtcgtcatcgaggagctcgccaacgtcgatccgtcgaccgcggcgtacatcagcatccacaacatggcctcgtggatggtgtccaggtggggccagccggccctgcgcgatgcgtggggcaccgatctgtcctcgggcagcaagctggcctcgtactgcctgaccgaaccgggtgcgggttccgatgcggcgtcgctgaagaccaccgccgtgcgcgatggcgacttctacgtgctgaacggctcgaaggccttcatttccggcgccggtgccaccgagctgctggtggtgatggcgcgtaccggcggtgccggtgccggcggtgtcagcgccattgcggtgccggcggacctgccgggcatcagcttcggccgcaaggaagagaagatgggctggaacagccagcccacccgtggcatcaccttcgagaacgtccgcgtgccggtcagccaccttctgggagaggaaggcggcggcttcaagctggccatgaaggggctggacggcggccgcatcaacatcgccgcctgctcgctgggtgccgcacagggtgcactggatgctgcgcgccgctacatgggcgagcgccgccagttcggcaaggcgctggccgagttccaggcgctgcagttcaagctggccgacatggtcacccagctggtggctgcacggcagatggtgcacaccgcggcacgcaagctcgatgccggtgccagcgatgccaacgtgtggtgcgcgatggccaagcgcttcgccaccgatgccggtttcaacgtctgcaacgaagcgctgcagatccacgggggctacggctacatccgcgaatacccgatcgagcgcctgctgcgtgactgccgcgtgcaccagatcctggaaggcaccaacgagatcatgcgggtgatcgttgcccgtcacctgctcaacaccgaagaggaactgcgatgaaggattggcgtacccaggagcacgtgggcctgaaggtggaggtggatggccacaccgccgtggtcaccctgaacaacccgccggcgcatacctggaccgtgcacagcctgtcggcgctgcgcgacctggtcggcgcgctcaacgcagaccgcgacatctacgcgctggtgatcaccggtgacggcgagaaatttttctccgccggtgccgacctcaaccagttcgcctccggcgacaaggccgctgcacgtgaggccgcgcgccgcttcggtgaagccttcgaagcgctgtccggtttccgtggcgtgtcgatcgccgcgatcaacggctacgccatgggcggtggcctggagtgcgcgctggcctgcgacctgcgcatcattgaagaccatgcccaggtcgcgctgccggaggccaccgtcggcctgctgccgtgtgccggcggtacccagaacctgccacgcctggtcggcgagggctgggccaagcgcatgatcctgctgggtgagcgcatcaacgccgagaccgcgctgcgcattggcctggccgaagaaaaggtcggcaagggcgaagccaaggcgctggcgctggaatgggcgaagaaggccggcaagcagagcccgaccagcatcgccgcctgcaagaccctggtgcagtccacccgcaccggcacccacgcctcggcgctggtggccgagcgcgaagccttcgtcgacctgttcgacaccgccgaccaggtcgagggcgtgactgccttcctggaaaagcgcgccgcgcagtggaagaacgcatgagcacggataccgctgccgacgacgcaccggtgctgttcgaagagcgcgtggccggcaacggcacgcgcatcggcatcgccacgctcaatgcgccgcgtacgctcaacggtttctcgctgccgatggcgcacctgctgctgaagcagctgaatgcctgggccgatgacgatggcatcgccatggtggtgctgcagggcgccggcgaaaaggcgttctgtgctggtggcgacctgcacagcctgtacaaggccatggtcgccttccgtgaggccggccacagcgacatccgccagaacgcctatgccgccgagttcttcgacgtcgaataccgcgtcgattacctcatccacacctacaccaagccgatcctgtgctggggccacggcatcgtgatgggcggcggcatcggcctgatgtccggcgccagccaccgcgtggtcagcgagcgctccaagctggccttcccggaaatcactgttggtttgttccccgatgtcggtggaagctggctgctgccgcgcgtgccgggcaacggtggcctgttcctggccctgaccggcgcactgctcaacccgggcgatgccatctacgccggcctggccgacgtgcacgtggccgaagaacgccgcagcgcggtgttcgatgcgctgctgcaggtggcctggtccaatgacaccgcacacaaccacgaacgcctgacccatctgctgcagtcgcatgccagcgatgccgccaccggtccactgctggcccacgcggcgcaggtcgatgcgttgtgcgaaggcgatgaccttgaagccatcgtggcgcgcattgccggcctgcagaccgacgacgcctggttgcaggcggctcagaagacccttgctgccggtgcaccgggttcggcacggttggcgtacgaactgcagcgccgcagtgccggccaggacctggccgcgatctatcgcctggagtacatcgtcgccctgcattgcgccgcccatggtgatttcgccgaaggcatccgcgcgctgctgatcgacaaggaccgcaacccgcagtggaacccggccaccctggccgaggccaccggcgcgtgggcagacaccttcttcgcttccccctgggccgacgccgcgcatccgctggccgacctgggcactccccttgttgaaaggagccttgcatgagccgcattgcattcatcgggttgggcaacatgggtggcccgatggccgccaatctggtcaagaacggccacagcgtgcgcgtgttcgatctggttccggccgcggtgcaggccgctgtcgacgccggcgccagcgctgcatcgtcggcgcgcgacaccctggccgatgccgaagtggtgatctcgatgctgccggccagccgtcatgtcgaaggcgtgtacctgggcgacgacggcattcttgccgcgatcccggccggtgcactggtcatcgactgcagcacgatcgccccggccagcgcccgcaaggtctcggaagcggccgccgcgcgtggcctgcagatgatcgacgcgccggtgtccggcggtaccgccggcgcccaggccggcaccctgaccttcatcgtcggcggcgaggaagacgcgctggaacgcgcacgcccggtgctgcaggcgatgggcaagaacatcttccacgttggcgccagcggcgctggccaggtcgccaagctgtgcaacaacatggcgctgggcgtgatcatggcggtgaccggtgaagccatcgcactgggcgtggcgcacgggctggaccccaaggtgctgtcgcagatgatggcggtcagcaccggccgcagctgggccaccgaagtgtgcaacccgtggccgggcgtgctggagaatgcgccggcctcgcgtggctacagcggtggcttcggcagcgatctgatgctgaaggacatgggcctggcggtggaagcggcgatgagtgtcggcgcttcgattccgctgggcgaagtggcccgcaatctctactcgatgaaccaccaggccggccgcggcaagctggatttctccagcgtcgtgcagctcatcacgagcgagaagtgacctggtagtgccggccgctggccggcaacctcatgcccccgtgcgggacaacggaggtgggatgggcggatgttcggtttcgaccggcatccgcccatttttttgggggtcggatccctttcgcaacgcgaaagggctctgaccccatatagccgtgcgagcctgggatggggtcagagccctttgccggtggcaaagggatccgaccccggcgccgcatcaggcaacgatcagcgttacatcaatgttgccgcgggtggcgttggagtacgggcacacgatgtgcgccttctgcaccagttcttccacctgctcgcgcggcacgcccggcacgttgatggtcagctcggcctcgatgccgaagccggtcgggatctggccgatgccgaccttgccggtgacggtggtgtcggccggcagcgcgaccttggcctggccggccacgaacttcagcgcgcccaggaagcaggccgagtagccagcggcgaacagctgttccgggttggtgcccgggccgccggcaccacccagctcgcgcggggtcgacagctggatgtccagcacgttgtcggacgagacggaacggccttcacggccgccggtggaggtggcctgggcggtatacagaaccttttcgatggacatcgggatgctcctggtcagtgggtgggtactgctatggagcctactttgcccggtttctgcgtacgttgggttgcagtccgtacgaaaaacttgattgatcgtcctgttggcctagatcgtccactcgcggtcggtggtgaacatgatggtcagccagcggtccggcgaggcctcgcccagcgcatcgccgatctcgtcgcgcagctggtcccattccagcaggggccgcggcgggtcgtcctcgcgtaccacgaagaacaactcgatctgctcgccacgccccacctgggcgacgtagctgcgatgctcgacgaagccatgcttggccacgatcgcgcgtgccaccgcgtccacgtgcgcctgcagttccggcggggtgaccagcaggatgccggccagcgcccggcgcaccgtcccgagcggggcgatcatcaccagcacgcagacgaaggcaaggatggccgggtcgatgtacggcccgacccaggccagcgaggtgccgcgcaccagtacgccgccaaggaaggccagcaggtagcaggccgacatgctggcggcgatcacccagttcttcgcgtccagcgcgatgaactccgaaccgatgcggcggttggcgcgcagcacgaaccaggccagcgcaccttcgccgatgatcgacaacccggcgaaggcgatggctgggccgagtgcgatgtggcggccgccggacatcagcgcatccaccgcattgaccagcgcatacagtgccgcgccgatcatcagcgtgccgctcacccccagcacgatgggctccaggtgccagaagcccatggtgaagcgctggttgagccgcgactgcagcgcgtcggtgctggtggacagtgcgatcagacgcgcgaccagcagtgacagccaggtcatcaccacatcgatcaggccgtagatgccatcgaagatgatcagcgaggaattggccagaagaccaaataccaccgcagcggcagccagcagcaatgagcctgcgatggacaggcgcagcacgccttgttcggtacgcgcatcgaagaagcgttcggtgttggcaggcatgcgggaatccagcgggaaatgggctgcggaagcagcgcgttgccattctatccagcctgcggcacgtcgccatgaccacgcccgcacagcgcctggaaaagtcaccagactggtaaccgtttgcggattgacgggtgcacacccgaagcgtatcgtttgtaccacgatgacatagaagcctccggtgaccccgggggcttctttcgtttgcgccgtcgcgcgctgcgaggtcaccgccaccggccctgacgtccccgtcgcagccgttctgttttccgccccgatcctgcctttcccgcgccgtcctggtgatcgcgtggggcgccgccgtgcgcgcaggatcggggcactccacatccatcaacgaaggaggattcgatgcccctgctgacccttgagcagtgccgcgcgcactgccgtatcgacggcgattttgacgacgccatcctgggtgacctgctggccgcagccagcgatgcagccgcggcctatctgggccgcgagctgtacgccgaccaggccgcgctggaccaggcgctggaccagctgccgcaggacatggcggcggcggtgaccgggcatgaagccgcggttgccgccgccaatgccgagaccaacgcggccaaggccaaggccatgcgtgatgtggccgatcgccgcctggccgtggcgaccgcgcgcagtgcgcgcctgctgcagggcatgccggtcaacgacagcatccgtgcagcggtgcgcctgttgctgggccacctgtacgcccatcgcgaagccgtggtcgtctctgcgcagacgttcgatgcaccggcaggcgccgctgccatcgcaatggagctgccgttcggcgtggccgcgctgcttgatccgtaccgatcggcagcaacgccatgaacgccggccacttcaatcgccgcatccgcatcgagcgccaggacggccagctcgatgcgtgggggcagccgctggacgcctggcagccggtggcagaactgtgggccgccatcatcgccgaccgcgcagacagcgtgcagcggctgacgctggaaagccgcctgccggcaacgatccggcgccagcgcttccatgtccgattggcagccgcacgacaggcaggcatccaggccggcatgcgcatcgtgcatgacggtcgtgttttcaacatcaccggcgttgcgcccgacttcagccggcgccagaccacggtgctgttcaccgaacagtcttcaggcatcgcctgagcgacgccaaccaggacaccgcgatgagttacgaagcacagctgcacgcgctgctggccccgctgctgcagggccggctgtatcccgaccttccgccggaaccggtcatctatccgtgtgccgtctaccagcagatgggtggacagtccgtgtggttcaacgaaggttccattcccgaacagaagcacgcacgcgtgcagctgaccgtctgggcagacagccgcgcccaggccaacaccctgatccgcaacatcgaggatcaggtatgcgcaggattgccgaccgccgaatcgttcggcgctgcaatcgccgtgcatgagccgatgctgcacaagtacggcgcgcggctcgatttcggcctgtggtacgtcgacccgtaaaccgcatcacccgtgcaacaccccagcccggcattcgccgggcttttttttatccaacgaggaaatacaccatggcactcaagcttcccaagggcacccagttcggcttcgcaccggtcgtctccaccgcgatcgccaccagcgcgatctccaaggctgcgccggcgctggccagcgttgccgccaacagcgtcgacaccggcgatgtggtggtcattgaactgccgggctggccggccctgaacaaccgcgccacccgcgccggtgctgaagccaccggcagcgttgaactgctgggcatcgacaccaccgataccgtgctgttccccggtaccagcggtgccggtgtactgcgcaaggcgggcgccttcgtcgacctggaccagcagggcgacccgaccaccgccggtggcgagcagcagtactggagcggcacgctgctcgaagacccgaccggtcgccaggtccagatgccgaccttcaagaacgccaagaccatcaccctgccgctgttctacgatccgaagaagccgtggtattcggcactgaagaacgctgacgccaagggcgagccggtgatcctgcgggccaagctggtcggtggcgacgtgctgtactggtacggctacctgagctacaacggcgacccgaccatggccgccaacaccccgatgggcaccaccgcgaccttcaccgcgctggcagactccatcctggtcgagggcgcctgatgttccaggtcaaggcgccggagagcttcaagagcaccctgaccatcgtcggtcacggccgcgagcagaagctcaacctgacctaccggcacctgtcggtagccgactacgccagcctgctggagcgtctgggcgatgacacgttgagcgtggcccaggccatcctggacatcgtggtggactgggatgccgatgtggcgctggacaccgccggcgtcgagctggcgctgcagcagcaggccggcctggatggcgccatcatcggtggctacacccaggccctgcaggtcgcacgcaagggaaactgatcgatgcggtgggggccctgtactggcgggcccccaccgagtccgagctgatgaagcttggattgaaggcaaagcactttccaccgccccaggtcgagctgtggccggagtgcgtgcttcccatcgaacttttctcgcgggttgccacccagtggcgcgtcggcgcaggtggcccgatcgggctggattacaacgtggtctaccgggagctggagcgcgaagcgctcgacggcgaccagcatgacgaggtgatggcggccatccgcatcatcgaacgcgctgccttggagcagatgcaacaggaatgagccggccatcgcggcaatgccgatggccgatcccggctccgccgaagcggagccgactctcccgaggaacactcaatgagcactacatcgcctggcagcacacggaccaccgtggaggccagcaacgcattggaaacggccatgcaggcagcaaggcgcggcatgaccgagatgaccggcaccacacaggagttccagcggcagctggagaagatcaacacggtgcagcaggccttcaatgccgtgctgaccaccagcgcatcattggtcaccgcactgtccacgcagctgaccgccctgaacacgcagctgcaggcggcggcgaaggcaggaacaaccgcagcgggcgcggacgccggcaaggctgcaaagaaggaagagaaggcccaacaggacgacaagggcctggcaggcatccgcaagggcctgggcggcgcgctcggcgactatatcggcaagaccgaaaacaccgccacggctgccaagaaagccttcgacaaagcattaaccggcgccgacgaagcgttgaggagcttcgtgaccaccggcaagtccaagtacaaggaactggcccagtccatcctgtccgacctcaagatgatcgccgcacagcaggcactggtctggggggcgaggaagatcgccggcttgatgggagtcgacctgacgcccaaggatgcagcgacggacgcggcggcggtggctgcaggcgtggcgactgccaaggacgccaaggccggtgatgccaaggcgggcgaaaccaaggacgccaaggacaccaagggcaccacaggactttcggggttccgcaagggcttcggcagcgcgctcggcgagtacatggaaaagaccgagaactccgccaagtccacccaggatgccttttccaaggcgttcaccggcgcagaggcggcactgcagagcttcgtgaagacgggcaagtccaactacaaggatctggccaagtcgatcatcgccgatctcaagatgatcgccatccaacaggcaatcgtctggggtgtcaaaaagatcgcgggcctgttcggatatggcacgggggtggaggccaacgccaacggtggcgtctaccagtcgccgagcctgtcggcctattccggcggtgtctacaacactccgcagctgttcgccttcgccaagggcgccggcgtgttcggcgaagcgggaccggaagcgatcatgccgctgcggcgcgggccggacggccgcctgggtgtggccgcgcacggtggcggcggtggcggcggagtgggagtcagcatccgcatcgacaacaacggtggcaaggaagtcaccaccaacgaaagcatgctgcagcagttcggcaacgagatcggccagttcgtggaacgcaagtaccgcgagctgcagagtcgtgacctgaaggcaggtggtgtgctcagcaggagtgccatgcaatgaccgacaccttcacctggccggcaaccagccagagtactggaaccaccaccgccgccgtgaagcgcgcgaagttcggagatggctatgcgcaggccgctgccgatggcctgaacgtcacttcacgcagttaccagctgcagttcgtcggcaaccgcaaaacgatcaacgagatcgtgaccttcctggatggtcatgccggccgcagcttcctgtggaaagggccactggggcaggggctgtacatgtgtgattcctacaccgacagccatctcggcggccaggtatcgaccatcaccgccacattcgaacagaccttccacgcgtaggcatgagcatggatcttcaacggatcgacctggataccatccagcccaacggaaagcgtggggagacccagcggccggccttcaccaagatcaaccagaactttcaggatgttgcgttggcgctggagggaatccctggtgccatcgcagactcagtctcgggaaagaaccgtttgatcaatgggaatttcgagctctggcagcgtggggacaacttcaccgccgccgctgcctactgtgcagacagattctttgcacagcagggagggatggacggagcagtcatattcaaatcacccgttgccccgggcgattcgaacttcccgagaagcctgtttacgttggccgccaattgcaacgggaatcacaacgccgccggacaccatttcctgttcgagcagcgtgtggaaagtgtgcggacctttgccgcatcggagagcacgctatccttcctggtctacaacgcaggcaccgcaggcagaaagatcgcagtcgagttcctgcagcgcttcggaacgggcggaagccccactgtcacggcgatccagccggaagttttcacgctcgcacagggcctgaaccggatcagcaagaccgtcagtcttccttccatctacggtaagacgcttggcggtggcgatgattcggtcatctgtgcggtatggctctcagcaggcagcgacttcaacgcgcgcacaggagggctcggcgcgcaggcaggccagttgtacttcggtgaaatgcaatgggaagccggcgcacgggcgacccgcttcgagtggagatcaccggcccacgagcttgcgctgtgccagcgctactaccagaagtcctttcctgttacagaggttcccaacagcaggagcagctccgccgtccatcggaacgccgtggccttcaacagtggtacctgccgggttgttgcagagttcaaaggcacgatgcgcagcacgccaaagctgctgttccatgcaggtggagaaggtggtgacatcggatcgccgagcttctggaggtactacgacgccgcgggcggaacatggcgcgcgggaacgctgactaacgtagtcatggcaacgagccaggcgttcatggctgacgtaggcggtgcgggcttcctggtaagcggctctgttctactggcaggccactacaccgccgatgccgaactctgagtgcattcatgcgtttgcgggatcgggcggaaagccgtgagatccgcccgttgacggaatgaaagtactcagaccccgagcggacgccgccgattcacctcgttcaaggagccaacaatggcaagaaagatcatcgacctcgattccgttcaaccgaacggaaagcggggtgaaacacagcgcccggcgttcaccaagatcaacgacaacttcgccgaagtctacgacgcgttgactgacgtggcgaaaatcccgcagatcgtggggaatgccatcaccgagcgcgttccaggcaggaatctgctcatcaatggtgccctgcagttctggcagcgccgtacatctggtcgtgttggcagtgggtcggggacgctgggcgcggaagtgttcttcgccgaccgtttcacgaactcggcactggtctgcaaccacgacgtacagcgggtggcgtacgacgggcaggccggatttccggaagatacacggtcgattctggtctgcaccgtatccgaggccatcgccagaagtggcgcctggatggggcagaagatcgagggtgtccgcagtgcaagtggagacatcacgatctcggtatgggcgaactctgatgcgcccggtcgcagtgtgggcgtgcgtgtcatccaggatttcggaaccggaggctcaccctcgccgcaggtggtgctggaagccggtgtgctcacactgggcaccaccgccaaacgtcacagcatcacggtgacgttgccgagtacccggggaaaggtgctcggcagcaacggcaacgaccacctctacgtagtgttcgacctgtgcggtgctggtcagaagggcgagctggtggcacagaacggctcgttcggctttacccagttccaggtcgaatcgggccgcgcagcgacatgcttcgactggcggccgccaggtgtggaactggcgttgtgccagcgctactacgagaagagctacaacctcgacatcgtacccaacacggcgcacaacgaagggcgcgaggcattctcgatcaactcaccgggaatggcgcattaccagagcgtgcgattccagacggcaaagcgcgctcatccctacgtgatgatcatctcggccgacaacatccagcaggatggacacatcgcggaagacaacatctcccgcgtgccctgcctggtcaactacgcctcgccttccgggtacgaagtcagctggaccaacaatccaggccgctggggcggctggtggcattggtgggccgacgccgagctttgatggggcgcccgcagggaacaggacgacagcaatgacgagaaaaatcatcgacctcgattccgttcagccgaacggaatgcggggcgaaacccagcgcccggcgtttaccaagatcaacgacaacttcgccgaagtgtatggcgcgctggattcgctggaaagcgctttgcagagcgcggctccaggcaggaaccgcctgatcaacggcaacttcgatttctggcagcgggccagcactggcaccacccaaggcggcgagatctatgtggccgatcgttggaccgtggcagcgctgagctgcacgcataccgcaaatcgcggggccaatcttcctgccggcggtgccgcgccggaatcgcgccgtttcctcaacagcgttgtctccaaggtcagtgcaggcagcagcgcctatgtcgcacagaaggtcgaaggggtcgccacgctgtccgacggcgaagtggtggtttccggcttcgcctatggcccgccaggaaaacgcatcggtgttcgtctcatccagcactttggcaccggtggttcgccgtccgccgcggtcagcgtagagctgggaaccgtagcggtcaccgccgcgtcctggacctatttccagctcagtgcgcgattgccatcggtgaaggggaagacgctgggcagcaatgccgacagcgatttcctgtggctggtggtggatctgtgcgccgatgcctatggcggtgtcatctccggtcagagcggagagttcggccttgcgatgatgcagctggagcgcggcgacagggcaacggcattcgacctgcgcccgctggcccacgagctgcagctgtgccagcgctactacgagaagagctacaacctggatgtgccgcctggcacggccgatggcatcggacgcgacaaccagttctacgaccgcagcgtcggcgttggcagcacctcgcatatccggtgtcgcgtccccaagcgggccatcccagcctacacggtctacagcgatgtgaacgggcaggcagggcgcatatccggcgcaagcggcggcatcggcacggtgacgtccatcgtatatgccggccagtccggcgcacaggtcaattaccaatccgccgcaggcaactggggctcctccttccattggaccgccgacgcggagctatgacatgtatcaactgaccgaagagatcgacaccatcaagtgcctgcagaccggcgccttcattccacgtggccaccgtctgtggaatgactatgaagcctggtgtacggcaggcaatgagccggagccggtaccgccgctgttcgcacccggctcggcgcagttccatcgcttcatccgcggaaaggcgtgggagtggatggcccagtgtgcccgcgatcgcggttatgacagcatcgagagctgctgcagctacgtaggcagtgcggtgccgcgctacgcgcaggacgccatcgccatgattgcctggcgcgacggggtcaacctcgcactggagactattgagtccaccgccgaggagaccgcgccggactggcggcaggtccaggcgcaactgccgcagccggatgcattcggctggcctgccgagcaggcgccggaaatcctcggcggctgaggaggacgacgcatggcacgacgcacaatcgaccttgataccgtgcagccgaacggaaagcggggtgagacgcaacggccggccttcaccaaggtcaatgagaacttcgccgatctctacacggatctggatgaactcgaaaccaccgtgcaggatctccggcgcaggcagaacggccggaaccggctgatcaacggtgacttcaggttctggcaacggggcagcagccgcactgtggtgtcgcctcttgcggtgtatgttcccgatcgcttccaggtggtatgcaccggggcggggcaggtcgcggtgtcacgccgcagcttcgataccccggcattcggggtcacgggattcatgaactgcgatctcaccggatcgacggccgcgaccgaggcgttcgtcacccagccggtggaaggcgtgcagacgctcgcgggaagtaccgtgacgctgagcatgcaggcatgggccgcgacgccgggctgccgcatcggcgttcgcttcatccagacgtttggtaccaatgggtctccggatgtgacggtccgggcaggcgtccaggagatcggcaccgcggccgcgctcaggtacttcaccgtcgagttgccatccattgctggcaagaccgtgggagccaacagcaagctgcacgtcatcgtcgactttgcgacgcccggtggttatggcggacagcttgtcggccagtctgggtccttctcgctgacctgcatgcagttggagaagggggcgacacctaccgactacgacatgcgtgatgacgcaaccgagttgatgctgtgccagcggtactacgagaagagcttcccgctggaacaggcaccgcagcttggcatgccgtcaccgcagggcgtcgccgccgcgttccaggcaggcctggcgcgcagtgagcagatctccttcaaggtcgccaaacgcactgtgcccgcactcacgctctactccaacagtgaagtggcgccggccctcggctactggtcgttgttcaacggcaacgggtggtcacgcggaatggctgtcccgctgttccttcgtcccgatggattcacgcttcagcttgatttcggttctggcctgacgccgttctatgcctatctggtgggcggcaactgggcggctgacgccgagatctgaccttggccgtcaacaccggcgcacgcagcgaggactgcacatgacacgaagaatcatcgacctggacaccgtccagcccaacggcaaacgaggtgagacccagcggccggcattcaccaagatcaacgacaacttcgccgagatctacgctggtctggacgacgcgcaatcggcgctcatgcatctggaaggccgcatggccggaaggaacccgctcatcaacggcgacttccggttctggcagcgcggtgcagtgttccctgcatccacgggctctcgctacatcgctgaccgctgggcggtcaatgccatcggcaccagggtggctgcctcacgcgaggatgtgcctccaggcggcggccagggagggcgcctgctggctgggtcgcgccacctgcttcggctggaggtgcagagcgttgccggtgccggcaacatggcgctggtccaacagcgcatcgaggatgtccggacactggccgggcgcaccgtcacgatcagtttcaaggcgcgcgcctcggtggacgacttccgcatcggcgtggagttgcagcagtcctacggaacgggtgggtctaccgcgcgcgacagcatcggcgcctcggtcgtgctcgatacgctgtggcgatggcaccaggtcaccgtggaagttcccggtcttgccggcaagacgctgggcccggacagctacctgcaactgagcttctggctggacgcaggtgccgatttcggcggccgcgcgttcgccgccgggcagaagagcggcagcgtgcaactggccgaagtgcagatcgaagaaggcgataacgccaccgacttcgaccgccggtccgaagcactggagctgctgttgtgccagcgctactacgagacggtggatgtaaaccggatcatcggcatcacctacaccgccaacggcgacacgcgtgcgtgcatcccgttcaaggtgcgcaaacgctcagcgcccagaatctcctcgccgtccaccgcgctgaacctggtgggcttcggcaatgccggcaacctggtcaacttcgacggcggagcgcccagctggcagtccacggttgacgcggcagtcatcgcctcgatgccgaacaacatgcagctctggggcgcggtggtggtgtggtcgaccacctcgcaggtgatggtccaggccgatgcggagctctgagccatgacaacccccgctccgcaggcgccaaagcacgcctgcttcaccaccactgcttcgctgcgcccaggccaccacgtcatcgtaccgtgcggccaggaacggtaccccgtgccaccccctcttcccaatgccgcacaggagaacaccccatgatcaccgccgatgcccagcagcttgagccgggtggccgcatcaccgtctatgaactcgacgccagcagtttcggcgccgacaagctcttcttccacgcgcacctgcagagtggcctcatctggtggcagggccaggaatatggcccctggccgatcgaggccagcggcttcgagcgcaccagcgaccagccgccgaacccgcgcctgcgcgtaagcaacatcgatggccgcatcaccgccatgtgcctgttgttcgatgacctggtcggtgcacgcatcatccgccggcagacgctggccaagtacctggatgccgccaacttcgaggaaggcaatcccagcgcggatcctggcgagcacttccctgatgaagtctggttcatcgagcgcaagatcggtgaggacaagcagatggtcgaattcgagctgaccaccgcgatcgatctcaatgggcagcagctgccgggcaggcagatcatcgccggcatgtgtggctggctggtgcgtggcggttatcgcggcgcgtactgcggctacaacggtccagcggtggccgacagcgacgacgtcgccaccgatgatccggcgcgtgaccagtgcggcggtcgggtacgcagctgcaagctgcgcttcggccaggacaagccgctgccctatggcggcttccccgccgcgggcctgttgcgctcctgatcgatcccctcccgaattccactttccaggcccgcccgcgcgggcctttttcatgggtgaaacatgcaaccgacaaccctgcaggccatccaggcgcacgccgtggccgagtacccgcgcgaatgctgcgggctgatcgtggccattgaaggccacgaacgctatcttccctgccgcaacgtggccgccacgcccagcgagcatttccgcctgcccgctgaggactatgccgtggccgaggacaagggcgaggtgctggccctggtgcacagccatcccgatgccgccgcaacgccgtccgacgccgatagggtcatgtgcgagcgcagcgggctgacctggcacatcgtcagcgtcggccaggtaacaggcgaggcaccgctgtgcggtgatctgcagaccctgcatcccactggctacatggcaccgttggtcggtcgccagttcgcccacggtgtgctggactgctacagcctggtccgcgatttccacgcacgcgaactgggcatcccgctgtccgagtacgaacgccaggacgactggtggagccacggccaggacctgtacagccttgaacggctgcacgccgagggcttcgacctgatcgagggcgagccgcagcggggcgacatgatcctgatgcagatccgctcgccggtcaccaaccacgcgggcatctacctcggcgacgggcagatgctgcatcacctgcatggccgcctgtccgagaccgtaccgtacggcggcatgtgggccgagcgcacccgttgcatcgtccgccatcgcgaggtgcgccatgactgaccgtcttcgtacgatccgcttgtacggcaagctgggtgcgcgctttgggcgcaggttccggctggcggtgaacagcccggccgaggcggtgcatgcgctgtgcacgatgctgccaggattccagcagtacctgatgggcgcaaaggccaagggcatggagtttgccgtgttcaacggccggcagaacctgtcgcgggatcagctgcacgacccgccgggacaggatgacatccgcatcgcgccggttctggtgggcagcaagcgagggggcgtactgcagacgattgtgggcgtcgtcctcatcgttgttggcgccgtggcatcggcatggggatatggagcgatcggccaaccgatgatgaagctcggtgtttccatggtgatcggcggcatcacccagatgctctccccccagccaaaaggcctgggtgccaaagacacacccgaaaacgcgcccagctacagcatgaacggcaccgtcaacacgcaggcgcaaggcaaccccgtgccggtcgcctatggcggccatgacaccaagggcatgttcatcggctcggccgtgatcagcggcggcatcctggcggaggaccagttttgaatcagaccactcatcccacgccgcgcacgcgtggcgcagccacgccagtgctggcgggtgccaagaagggcgcgagcaacgcccgaaccccggtcgaaaccgccgacagcctgcactcgatggcggtggcccgcatcatcgacctcgccagcgagggcgagatccgtggcctggtcgccggcaagcagtcgatctacctggaccaggtgccgatcgagaatccggacggcacgctgaacttctccggcgtggacgtgcagacgcgttccggcacccaggaccaggagcacatcagcggcttcccctccatcgagaacgaagtcggggtcaacgtcgagctgcgcagcgatgcgccggtggtgcgcaccgtatcgggtgccgatctgtcagccgtccgtatccgctttgcggtgccggcgttgcagaagaccaacaccgagaacggcgacactgaaggctaccggatcatgtacgcggtggatctgtccaccgacggcggcccgttcaggacagtgctgaccgatgccttcagcggcaagaccaccagccagtacgagcgcagccgccgcatcgatctgcctgccggcagccagtggcaggtgcgcatccgccggctgaccgccaacgccaacagcagcaccatcgccgataccgtcaacgtgctgtcgatgaccgagatcatcgatgccaagctgcgctatccgaactgtgcgctggcggcggtgcaggttgatgccagccagttccagaacattcccacccggtcctaccagctgtggggccgcatcgtgcgcatcccctccaactacgatccgctcagccgtctctacagcggtgtgtgggacggtaccttcaagagtggctggaccaacaatccggcctgggtgttcttcgacatcgtcaccaacgatcgcttcggcctgggccatcgtgttccgctggactgggtggacaagtggcggctgtaccagatcgcgcgctactgcgatgaactggtcagcgatggccagggcggcaaggagccgcgcttcacctgcagcctgtatctgcagacccgcgccgaggcctaccgcgtgctgcaggacatcgccaccatgttccgcggcatcagcttctatgcggcggggcaggtgatggcctcggccgacatgcccaaggacccggtgctgacctacagccaagccaacgtcatcgaagggcgtttccactatgctggcagcagccgcacggcgcggcacacggtggccctggtgtcgtggatcgatccggacgacttcggtcggcagaaggtcgaagtggtccagcacctgcccggcgtggcccgctacggcatcaaccagaccgaagtgacggcggtgggttgccactcacgttcgcaggcgcagcgcgtgggcaaccacatcctgcataccgagatgctggaaaccgagacgatcagcttctcggtgggcctggatgcgctgggctgcatgcccggtgatgtgatccaggtggccgacccgaaccgcgccggccgccgcaatgcgggtcgcatccgcagtgcaggtgcgcgcagcctggtgctggaccgcatgccggaacagatcgcggccggtgacaccctgcgtgccaccctgcccagcgggcagaccgaagcacgcacggtgcagtcggtggacggcgagacggtgaccgtcagcgcgccctggtcggcggtgccggtggcgcagtcggtctgggcattggaatcgccggagctggccctgcagcactatcgcgtgctgtcgatcagcgaaggcgaggacctgacctatcagatcaccgcgctcaagcacgtgccgggcaagtacgccgccatcgacgacggcacgcgcctggagcagccgccgatcagcatcatcccgcccagcgtgcagccggcaccggccaacgtgcggatggcctcgcatgtggtggtcgaccagggcatcgctacctccgtgctcacgatcgagtgggatgctgcggacaaggcgatcggttatgacgtggaatggcgccgtggcgatctcaactgggtccgcgctggtcgcgtcgggacgcagagcctggaagtgcggggcgtctacgcaggcgagtatctggcccgcgtacgcgcggtcaatgcgctgggcgcggtgtcgcagccgacgctcagcatgctcaccaccattgaaggcaagacgacgccgcccccctcgctggcatcgttgaccagcactgcccgccccttcggcatcgcactgtcctggggcttccccgcaggtgcaaccgataccgaacggaccgaactctggtacagcactggccccaatcgcgagagcgcgatcaagctgggcgacttcgcctacccgcaggcccagcaccagatgaacggcctggccgctggcgcgcgcttctggttctggggacggctggtggatcgaagtggcaacatcggcccgtggtatccggcgcaagccggggtgatgggtgagtccagcagcaacccggatgactacgacgcctacttcgccggccgcatcaacgaaagcgcgctgggccaacagctgaagggcaagatcgagcgcgtcacccaagtgctgccgctggtctgggatgccgaggcaacctacagcccagggcagaccgtcatccacgacgggcggatctggagctggcagggcactgccgcaggcaatgaaacaccgccgggcagccactggaagaacatcggcgatgccattgccgaggcgggtgccatcgtcggccgtgtcgatcagctggaaatggacgtgaccgacgtcgatggcaaggtggccgcgcaggggcagaaggtcgatggcctgttcgcccaggtcagcgaccacagtgccggcgaggaggactacaacgtcggcgagaacgatgtcagcgccggcgccatcaccgtctacagcgtgatggccgagaaggacgcggcactggccaagcgcgtggacacggtcgaagcgtccatcgaaggtgttccaggcaagatcgagggcgtcagcgccgcggtccagcaggtctcgcaggccgtggtcaacctggatggcaaggtcagcgcgacctatacggtcaaggcgcagatcaccagtgccgggcagatctacatggccggcatgggtctgggcgtggagcagcagccagatggcagctatcagagccagatcctgatgcaggctgatcgcttcgcgctgatcaacaccaacagcgggcaggtcagtgcgcccttcgtggtgcagggcgggcagaccttcatcagccaggcactgatcggcaacggctggatccagaacgccatgatcggcgatgtgatccagtccaatgcggtgggtgccggcgggcaaccacgatggaggctcgacaagaacggcacgttgacgatgaacggccccgagaacggcggccgcctgaccatcaatgacggtgtcatccacgtttacgacagcaacggccgcgtccgcgtccgcatggggatctggtaatggcaacaggtatgcagatattcggcccggatgggcagatgtggttcgacaccaatgatcgtgccggcaagatcatgggcactctttcagtcgttgggagctcgtccagcagtgtgggcctggccggcctgggtgagccatttgccatcctgcccagccctggctccgacagttggcaggaccagaatggcaatcagttttccgcgcctgcgctggggtacatgtcgtttgtcgacggcggcaatacattgcggatgcagttcacgttctcgccgattgccaacccgactgcttccatctactacggagtcttctgatgtctgttggtcttgaagtcaccaatgacagcggcgttccggttcttgtgaacgcacattccttcgtcttcttttcgatagccaagggcacgcagtccattgcaagcaatacgtccgcctatggcgcgagcgggtttgtaagccttcccgcacagagcgtgccgtacctggtgttcatccgctgcaatggcggatccgcacaggtgatgtcagcgctgaatggcttttactggagcatggggcaagggaccaccagcttcgagtggtgggcatgggggcgggcggtcaacagtggaagtacaggcatgcaggtctacaacgccgacggatccatccagtgggatatgtcaaaccgtccactgcgcatcgctggtttggtcgataaatcgggtggaagtgttccaggctttaccgagatgtccaccgacaatgtgaggcaagggccactgttcaacggtcctggtgagaatctcgcctatctgatgtccgacattggactgtgccatgacatctacgcctactacggaagtggcccgaccattcgcggcaacatgcgctatcagccgtacatcaatactccaaatgcttcgcaggtgcgattgaactactgcaggcgtagagagaaccgtcaacgttcgttgagcggcgcgtcctaccagagtttcacggggcagttgccgaacttcctgattgccgcacacacctactagcctgaatcaggcccgtgcaggcggccatttgagccgccagggcctagactgcgcccctcctacgctcctcgacgacgcactgcagtgatcacgccaccctgacccttgccgcacatcggcagccggcccgcccggctcaggatggtcggcctgctcgaatcgatgatgaccctgcagatcgtcgaggacatcaccgagacgcccagcgagcgcaaccgcgaatgcgtcggccagggcgtggcgaatacggtcaccggtttcctcggcggcatggccggctgcgcgatgatcggccagtcggtcatcaacgtgacgtccggtggccgtggccgcctgtcctgcctggtggccagcgtgctgctgctggtgctggtggtgtacggcagcgacctggtgcggcagatcccgatggccgctctggtggcggtgatgatcatggtcagcatcggcaccttcagctggcgctcgctgcgcgacctgcgcacgcatccgggcagttcctcggccgtgatgctgctgaccgtggtggtcaccgtggccacccacgacctggccaagggcgtgctcagtggcgtgctgttgtcggcgctgttcttcgcgcgcaaggttggccgcatgctggatgtgcagcgcgaggatgtcgcagacacgcaggtctaccgcgtaggcgggcaggtgttcttcgcgtccgccggccagctgggcgccgcgttcgactaccagcatgtggcgccgaaggtgcagatcgacctgcgtgatgcccatctgtgggatctgacggcggtggccgcgctggaacgcgcgcaggaaaagctggccgcgcatggggcgggggtgacggtggcgggcctgaatgcggccagccagacgttgatcgaacaggtaggcgggcgcggaggcgggcattgaggttccagcgtccgcgtctgagacgacgtgcacgcattctgaatccagtcaggcacctgaaaccggcgccgtcgtagcattgcccgcgtgatggggccgatggacggcccctccttgccggcacccgctggcgacacgcaagggagaaactggcaatgcaggcattgggcgcgcttgggcgcagcgaacgggtcggcgtcggccatgggtattggaaggtgctggccctgtgcctggcgctcaccgcatgccaggcgccttcttcccaggcatcgaccgaaacggcggcccccgcgtcgattgctgcggcatcgccgacagccccttccggcccggcatcggcagattccctccactacccggatgcgtcctataccgacggtcgcctgcgcccagcctatggctggtgtgtggatggggtggaagatgcaggcaagctccaggcctgcggcaaggacgaactcgcctaccaggaagggcgtctcgaagcggcggccagcaaggcgctggccggactcgacggcgctgcccggacggcattccaggccacccaggcgagctggcgcagcgatacagaccgttattgccgcgatgtccccaacagcagcgtgcagcagctgcagggcgcgcaggaatgccgcctgtaccgtgttgccaaccgtgccgaccagctgctggcgcagagcgcgccgccggatacctcgtatacccaggcagcgctgcgtccggaatacacccgttgcgtgcaggacgcccgcggcatggacgaccagttggaagcctgcgatacggccgagctcgcccatcacaaggcgctgctggaagcacaggtcgcgcgactgatggacggccccgacggcccgggcaaggaccgctggatggacgagcaggccaactgggctgcagacacggacaaacactgcagccaggccactgacagcgtgggcccggcgttggatgcacagtcgtgcctcatcaatcgttacgccaaccgtgcggtggaactgcagaagggcgtgttggcgcgatgatgagcctcgatggcggcattgcagggggcctcgacgccgatccgaaagcccgtctgctggcagggcagcggaattgactgcggtcaagcctttaagatgtccttgaaacggcagtttcgttgagattcgtgagcattgggcatcatgtgagcgacctcaacatacgaattcgcgaacgcgatcgcgaggacgttgcgccgtgcagattgcagttgggacaaggtgcacacattctgaatccagtcaggcatctgaaatccacgctggcgtagcatgcaattcccgatggggccgatggacggccccgcgttgacgggccacatgcctggatgccaaggagatgcaagcaatgcagggaacaaaccaccttccagcggccccccgcgaaacgttcggcagggccggggccatcgcgcttgcgctggccctgggcctcagcctggcagcatgccaggccaagagcccggaggcggatacggcagttgcccccgcggccgccgcgcccgccaccgcatcgccgcccgccactgcagagcctgcacgcgccgcacctgccacgacagcggccgatgccgatgatcaggacatgccgccgcagcgcccggatgattcctacaacaaagccacgctgcggccgcagtacgccacgtgcgtgaactccagcggcggcgagacccccgcactgcaggcgtgtggcgatgaggagcttgcctggcaggagcagcgactcgagcaggccttcatgaagatcgtcgacggtcccgatggcaaggacaaggataggctgatggacgagcaggccgcctacatgtccgataccaatcgctactgcagctggaaccctgccgaagacgggcaggggcagatgctggacgcgcagtcctgccggatcaatcgcaccgccaaccgtgccgacgtgctgcaggcactgacctcgaagtaattcccccgcaaaggagtgcaggaaaatggatgttgtgacccaggcaaagcaggcaatggacaactggcatcgcggccagacgtcggcgcatttcgaaaccggaggtcgcggccccggccacgtttccaccggcaggggcgaccatggcggcgtgtcgtatggcagttaccagtacgccaccaacgttggcggcgtggatgagtacgtcgccgcctcgcgctatggcaaccgcttcaacggcctgcaggcaggaaccccggccttcaccgaacgctggaaggaagtggcggccgccgatccggcagggtttgccagggaccagcacgacttcatccagcacaagtactacgacgtgcagatgggccgcctgaaggatgtgggcatcgatctctccggccgtggtgcggccgtgcaggatgcgctgtggagcacctcggtgcagtaccgcggcatgacccggtcggtgttccagaagggcctgcagcaggcctatggcgaagacttcaagctgactgagctgagtgacgagcagatcgtccgcgcggtgcaggactacaagcacgccaatgtgcaggtgcacttccagagctcgcccaccctgtgggattcgctgcgtgatcgtgcgctcaccgagaagaccgcactggtcgggctggcgcgctacgaccaggtcaaccacaaccccgaggcttaccggggcaaggattaccagcaggtgttcggtgaacctgagcccggccagcgcggccagcgcggccagcgtgcggcggcatcggcgatggccgacggcgtgctggcacccggcgagcgtggtaccgaggtccaggccctgcaggccaagctgatccaggccggccatagcggtcgcaacgggcaaccgctgacagccgatagccactacggtgccaataccgagcatgcagtgcgcgagttccagcaggcgcatgggctgaccgtcgatggcaaggccggccggcagaccctgcaggccctggatacggcggtacgcgagcacacgccggcgcagcctgtggcaccggccacgcctgcaccggtcactcctgctgcggcacccgcacccgcgactgcgcgggaagccgatgccgccgccgcgcccggtggccagcgcatcgtcgtggtcgaaccctttggcaacggcagcagcaaccgcacactgcgccatggcaccagtggcgaggatgcctatcgcgaactgaagatccatcaccccaacaccaatgccgaggccgtgcgcaccggcaatgccgccaaggctgaccgcccgtcggccatggtcgagggcgaactggaaacggtacggacccgcggtgatcgcaacggcatcccgctggtgcacaaggatctgatcctgagcaatgcgcgcggcgatcgggaggtgatgattcccaatccggtcgccgggtatgtccaggtcaacaatgacaagtggaattcgatcagcatctggagccatccggccgggcatccgcagcgcgaactggtcgggcaggtgctgcacggtgcgcgtggaaccaccccttacaagaccggtgatttcgtcgagtacggtgcgccgttgatccgccagtccgatgccggtaccccgggtgccgtgcacgcgcatatcgagctcgagcccgatcagtaccgcaggttcctgggtgacatgctcaacgaccgcatcaccctgggcggcaaggtccacgcgcagggccccgaggccgcgcaggccgcacgcagtgcacagcaggcgccgatggccgatggcgtgctgaagcagggcgagcgcggcgatgaggtcaaggccctgcagggcaagctggcggcgctgggctacgccggggccgacggcaagccgctgcacgccgatggcgtgtatggcaaggacacctttgcagcggtcaagcagttccaggccaacaatggcctggacgacgatggcaaggccggccgcaagaccctggcgcaggtggatgcgcccaacgcggtgaaggccggtatcgcgccggcggcaccggcccaggccgaacctgcagcgccggccagcatgcgcgacgccgggcatgccgacaacgcgcgcttcggccaggctttggacaggctgcaggcgctcgaacagcagcgcgcccaggccggcctgaagccgctgttcgccaacccgcaggaagccgaacgagcggctggccagctggcctacgaaagcaaggtgtccggcatgcgccagatcgaccatgtcgtggcccgcccggacggcaccggcctgttcgcggtgcagggcgagctgggtgacccggcagcgcagcggacctttgtcgaccgccagcaggcggtgtcgcactcggtcgaggccagcagccggcagagcgaagcgctggacagtcagttcaaccagcgtgcgcaggaacagcagcaggaacaggttcgcaaccgcgggttgtaagccacgcggtgtccccggggccggtcgagcggccagccccggagccacccgccgccattcagccgtccggtgtaaactattgatctcactggcaatgccagtctccgcgatcaacaccccgatgccgtccgccaccgcccgttacgccgattccctgcgcctgtccgttgcccccatgatggactggaccgatcgccattgccgcgtgttccatcgcgtgctggcaccgggtgtgcgcctgtacacggaaatggtgcacgccaacgcggtcatccacggcgatcgcgagcgcctgctcggcttcgaccgcagcgaacagccgctggcgctgcagctggggggcagcgatcccgcgctgctggcgcaggctgcgcgcatcgctgccgactggggctacgacgaggtcaacctcaactgcggctgcccgtccgaccgcgtgcaggccgggcgcttcggcgcctgcctgatgcgcgagccgatgctcgtggccgagtgcgtggcggcgatggtcgatgccgtcgagatcccggtgacggtgaagtgccgcctgggcgtggacgaggacaatgactacgacgtgttcgccgccttcgccgaccgccaggtcgccgcaggtgccgcgatggtggtggtgcacgcgcgcaacgcgtggctgaagggcctgtcgccgaaggagaaccgcgaggttccgccgctgaagtacgactgggcctaccggctgaagcaggagcgcccggcgctgccggtggtgctcaacggcggcctggccagcgtcgaggtggtgcaggcgcaggccgcgcacgtcgatggcgtgatgctgggccgcgcggcctaccacgatccctacctgctgcatcagctggaggcgctgcagaccggcgccccgctgcaggcccgcggcgacctgctgcgcgcgctgcgcccctacgtggaagcgcgcctgggcgaaggcctggcgctgaagcacatcacccgccacctgctcggcctgttccacggccagcccggtggccgcgcattccgccaggtgctgagcgagggcgcacaccgcccgggcgccgattggaacctggtcgagcaggcgcttgccgcgaccgaacgcgacgctgatcgcgccgcagcgtgaccgctgtcacattcctaacttgacaaggcgcggcgattcgttccgaatgttcacctagctgaacatcgcggggtcgcggccggaaaagttcagaccggattcactgccccaaaccaagaatttgcaaaggatttgtaaagcgccgggccccgaacccggcatccggatttacgacttttgaacgaatcgccgtgctcggctaggatcgcatcgatgtcttccgctcccttccatcgccgcattgccctggccacctgcgtggtcctgtcggccgtgccgctgtcgtcggcgctggcacagcagccgccgcggggtgagcaggggcgtgcggagatgatggagcggggcgagcgcggcaaccgtggcgacgagcgttcgctgtccgatgccgtgcgccgcgtgcagcgcaccacgggtggtcacatcctcggtgccgagcgcgtgccgttcgatggtcgtgatatcaaccgggtgaagtacatggacgaccggggccgggtccgctacatggacgaccccgccccgtcgcgttcacagccgcgcacgccgcggtcggatatgtcatcactacgcggcgataacccctgaacagggatagttgtcgctatcaacccgtaccccacaggcctccgggccacacccaggacactagggagagttcatgcgtatccttctggtcgaagacgaagccccgctgcgtgagaccctggcagcccggctcaagcgcgaaggctttgccgtcgatgctgcgcaggacggcgaggaaggcctctacatggggcgcgaagttccgttcgatgtcggcatcatcgacctcggcctgcccaagatgtcgggcatggagctgatcaaggccctgcgtgatgaaggcaagaagttcccggtgctgatcctgaccgcgcgttcgagctggcaggacaaggtcgagggcctgaagcagggtgccgacgattacctggtcaagccgttccacgtcgaagagctgctggcccgcgtcaacgcgttgctgcgccgcgccgccggctggagcaagccgaccctggaatgcggcccggtcgcattggacctcgccgcccagaccgtcagcgtggccggcagcaatgtcgacctgaccagctacgagtacaaggtactggagtacctgatgatgcatgccggtgaactggtctccaaggccgacctcaccgagcacatctaccagcaggacttcgaccgcgactcgaacgtgctggaagtgttcatcggccgcctgcgcaagaagctggacccggatggcgaactgaagccgatcgagaccgtgcgcggtcgcggctaccgtttcgcgatcccgcgcaacgagggctgagccggctcaccctggcgataacacgatgtccggccgtctgtggttcttccgacgctggcggccgcgctcactgcaggcgcgccagatgctcgccgcgtccgtgggcctggtcgcgttcctggccctggccggttacgcgctcgacgccgccttcgccgatacggcgaaggcaaacctgcgcgagcgcctgaagaactacgccacctcctacgcggccggcatcgacttcacccgtgaccgctcgctgtacatccgcgagcagccgccggattcccgcttcgacgtgcccggcagtggcctgtacctgcaggtagtgatgccgcacggcaagggcaattcgatgtccgctgaaggcccgatgctgcccaccgtcggcggcggcctgctggcaccgcgccaggaggtgttcgaaggcccgctgccgatgatccagatcgatggcagccagggctcggtgtaccgctacggcctcggcctggtgtggggcgccgacgccgatcctgccaccgaattcccgtacaccatctatgtgatggaagactcgcgcgcgctgggtgcccagctgcgcgtgttccgtggccgcgtctggttctacctgggcggcatcggcctgatcctgctgctgctgcagaccgtcatcctgcagtggagcctgcgcccgttgcgccgggtgatcaccgagttgaccaaggtgcagcgcggcgagaccgagcgcatgagcgagcgccacccgcgcgagctggaaccgctgaccgacagcatcaacgccttcatcgaaagcgagcgcgagaacctcgagcgccagcgcaacaccctggccgacctggcgcacagcctgaaaacgccgattgccgtgttgcgcacgcagatggacagtggtgccggcgacggcgcgctgcgtgaggaactggacgtgcagctgcagcgcatgaacaacctggtttcgtaccagctggcacgcgcggcctcgtcgggccacaagctgttctccgcgccgctgccgatcgagtccaacgccgaggaaatcgtgcgtggcctggagaaggtctacgcctccaagggcgtgctgtgcgagttcgacatcgatccggcagcgcgcttccacggcgaaccgggcgacctgcaggaactgctcggcaacctgctggagaacgccttcaagtgggccaaccgccgcgtgctgctgaccgcgcagccgctgccggccccgaacgcgcgccgcgccggcctgctgctggcggtggatgacgacggcccgggcattgccccggacgacatcggcaaggtgctgcagcgtggcgtgcgtggcgacgagcgcgtgcagggccacggcatcggcctgtcgatcgtgcaggacctgatcaaggattaccgcggcgaactgaccgtgggccgttcggccgaactgggcggcgcccgcttcgaagtgcgcctgccgccagggccgtaagcctcgttgatcggtagtgctggccgctggccggcaaccaagcaatgccatcgaagatcatggggttgccggccagcggccggcactaccgcattgcgatcctgggcggctcgccgtagaaccgtcgcagctgcgccgtcacctccggcaacgcctgctgcagcagatccggtgccgagaagtggtactcgctggccaccgcgaagaactcttccggcgcctcggccgcatacggatcgatcagcgtctcttcgcctgcgtccacctgcgcacagaacgcgtcgtaggcgcgctggaacgtggcggcccactcgcgctgccattcgcgcggcagcggcggcgtaccatccatcgcaccatcgagcgcatccagcttgtgcaccatctcgtgcaccgccacgcagtagccctcgtgcggcgccgccaggtcggcctgcacatcggcccaggacaggatcaacggaccgctgtcccacgactcgccgatcagctcgtcatcccactcgtgcagcacgccagccgcgtccatgtggctgcggtgcacgcggaaggcatcggggtagacgatcagctgcgaccagccctccagccccacctcaccgaacgccagcagcggcaggcagcacagcgcggccagcagcacgccgtcaccggcctgcagctgcagctcaccgatcggggtgatggtcttctcgtgcaggaagcgcgtggccagtacgcgcaggcgcgcgcggcgttcgtcgtccagtccgtgcagccaggccgcgcggcggcaggcgtgttcccacagtgcatcgtcgatcggccgcggcgtaggccgcagccactgcagcaacgacttgatcagcggaacattcccggcaggtagctgtgccacttcggcgcacggatgcgctgcagcacgtcatcgtcgctgccgccgcccccggtgctggtggcactgctggccgcagggcgtaccggtgccggcttggtggtcgcagccgaggcagtcgcggtcggcgcgcgctgcgaggcggcatcaccgttggaggacacgcaggcgccgcggctgtcgtccagcgctgccgtcgcagacgccgcgaagggcatcatcagcaggatcaggcaatgggcataacggcgcattgacgacatccacgttaagggagggtgagttcccgattctagctcgaacccggcgccccgttggaagcccccgcggaacccagcgtggcgggcgtcgctggcggctttcccgcataattcctgcctgacttcgtggaagctgccgtggacgatcgccaattgctggccaaactcgctgccggtcgcctgtccggcgacgccctggcccgtgagctgggccagacccgggcggctatttggaagcgtattcaagggcttagggccgccggtgtggatgtcgagggccgtgccggcgagggctatggcctgacccgcccggttgacctgctggacccggcggcgatccgtgctggcctgccggccggggttctgccgctgctgcacgacctgcaggtggcctggacggtggactccaccaacgctgaattgctgcggtgcagcgcgccccagcgcggggtcagcgtgctgctggccgaacgccagaccggtggccgtggccgtcgtggccgcacctgggcctcgccgctggccgcgcatatctacctgtcggtgctgcgcctgtactccggtggcctcggccgcctggccgggctgagcctggtggccggcatcgccgtggctgaagcgctgcacgacctgggctatgcccaggcacagctgaagtggccgaacgacctgatcgtcgatggcaagcgcaagctggtcggcctgctcgcagaaggcggtggcgaatacgccggcccggcgcgcgcggtgatcggcatcggcatcaacacgcacatgccgccgtcgttcgccgagcagatcagccagccgtgggtggacctggacaccctggccggcaagccggtggaccgcaacgtggtcgttgccgccgtgctggcccgtctgctgccggcgctggaggaattcgatcgcgaaggcctcgctccgttcctgccgcgctacgccgccttcgacatgctggccggccgcgaagtacgcgtggaactggacgggcagtggcagcacggtaccgcgcttggcctggccgatgacggcgcattgcgcgtgcgcatcgatggccaggagcgcctgctgcacgccggcgaagtcagcgtgagggcagcatgagcgattggttgttcgacctcggcaactcgcgcttcaagttcgcgccgttgcagggtgaccgtgccggtgacgtgcaggcctgggcgcatggcgccgaaggcatggccgggcagccgccgcacagcctgcccagcggccgcaccgcgttcgtggccagcgtggccgcgccctcgctgaccagcgccatgctggaccagctgcaacgccgcttcgaaaacgtgcacgtggtgcgcaccagcgccgaatgcgccggtgtgcgcattgcctacgccaagccggaaaagttcggcgtcgaccgcttcttggccctgctggctgccgcaaaggcacagcgcccggtgctggtggtcggcgtgggcaccgcgctgacgattgacctgctcgacgccgacggccagcaccacggtggccgcatttccgcgtcgcccacgaccatgcgcgaagcgctgcacgcccgcgccgtgcagctgccggctaccggcggcgactacagcgagttcgccaacgacaccgccgatgcgctggcctccggttgcgatggcgctgcggtggcgctgattgaacgcagtgcgcagcaggcgcacgcgctgctgggcgtagcgccgtcgctgctggtgcacggcggcggcgcaccggcgctgatgccgctgctgccgggtgccgactaccacccctcgctggtgctggatggactcgcccgctgggcggtgcaccagcccgcaggctagtatccgcgcatgctgacccgtgccctgatcgtcgtactggccgttctcaatcttggcgtcgcctgctggtggctgctgcgcgatgcaccgcagccacctgcgcctgcaccgcaaccggctggcgtcgccgagctgcgctgggtgcccggtggcgcggatgccaatgccgcagccgaggccaccgccgccgccccgaccgcaccgctgatggagcgcgaaccggccgcgaagaccgcagtggctgcgacgccggcacccgcgccggccgtgccggccaagccggaaattcccaagccgcagacggctgacgctacgccggttgctgccgccgccaagccggcaacaccgcctgcacccgttccggcaccggaaaagcccgtaaccccgcccgcggccgccgagccgccgcgctgcgtcgcgctgggtccgttcgccgaccgcgccgccgcgaccactgcgcaaggcaaggccggcgcgctgctcagccaggcgcgcctgcgcgaacagcccgctgccagcggcagcgcccgttaccgggtgatgctgccggccgccgccaatcgtgatgaagcgcaggccaccgtgaaacgcatcgtcgccgccggcctgagcgactactacatcatcagccagggcgaggaggccaacgccgtggcgctgggccagtaccgcaaccgcgaaggcgccgagcgccgcatggcagcggtgcaggccgccggcttccagccgcgcctggtggccagcggcgacgccggccaatggtggctggaagggcaactggcggcgggcacgcagccggcccaggcccagcagcgcagcggggcggcacagagccggtcgctggaatgcacgcggttgcgctagaatccccggaccgcggcgctgccgccggtgcaccacccatgccgctttagctcagttggtagagcaactgtcttgtaaacagtaggtcatccgttcgattcggataagcggcaccatctccatgagtcagcgcttctttgcgctgcgccaggtactggcccagtggctcgaaaggcagcacacccggtgcctcggcagtcttaccttgagaatgatggtccgtcctgcgcatggaccagctgcgctggctgctgttcaagatttgccgccaacgaatcagcgcgatgaagggactctgcttcaggcgcgcgaagcgcgtccatcgtattcatggttccacggcgttgggcaggatcgtccatcgctccctcgacgaggaatactctctcgccacgtgcaagggactctgtcgggttgttcaatacaacgtggtcaactcttgaaagcccttgctccttcgcgagcaccagcaaactcgcggacatgcgttggcttgactcgtcccactgcttcccgctctcggcgtccatgcgttccactcccgctcttatctgcatgtagagcgaacgatcggcatcgtcgagttcagcgactgagaaagctgttcgctgcattgagggtaagttgacattggcggcggtgactctttcctcgaccgtagtgcgctcggcgtcaaatgctggctcgggcctgcgccgacgttgcgtgggcgctatgtgctggtcatagtgcgcgccataatagagctcgtacgtcgcatgagggccaaccgacggagcctccgtcttgaacacgtcagcgatctgacttagtgcttggttacggttgatctgccctgcctcgagtttcgccgcaatggctccatactgctgggggcgatcgcctgtgcccgacacgccaatgtttggtcctccggctgcggtgatttcacgctggacctggacattgctgagcgtggcagctgcttctcctcgcagcgaggtcttcacaaaggactgcttagacgcccgatctggttgctcggtgaagaggtgatgcccaatttcatgagaaagagaacgtgcgattctggagccttgcccgatggcgttctcgtcaatgacgatcttcacaccgggaacaagataggtgccgccaccggctggcccccattcgacacccaggttgtcgtgatcagcctgtgcaagacccgctcgaagtgttggggatttggtcagaagcggtaccagcgaaggatcaaccaaaggtgaagccggacgacgtgtggcccctgtgacctgccccctttctcagggccactagctacttagtagagtccaggttggggagcataccgctccggtgggtcaggtttcgatcagcggtcgaaccagtcaaggcaccttcgttgcgcagcgcggcggcgaactcggcaggcgtgcatttgggcagtgagctgtgcggacgcacctcgttgtagtccttgcgccagatggcgattaccgcccgtgcgtgctcgagcgagataaaccagttttcgttcaagcattcgtcccggaacttgccgttgaagctctccacataggcgttctgcgtgggtttccctggctgggtcagcacaagcgtcacgccgttggcggtcgcccactggtccagcgcccggccggtaaactcgggtccctggtcggtcctgatcgccgcggggtagccgcggaaacggcataccgcatccaggatgtcggccacgttctggccatttatcctccggccgacggcgatttccaccgcttccttggtgcaatcgtccaccaccgtcaggcacttgatcgggcgcccgttggccagggcgtcgaagacgaagtccatcgaccaggtgtggttgggccccgacggcagctgcagcggacggcgctcgacggccacgcgatcgcgcttgcggcgcttgcgcaccgccaggccagcgttgcggtacagccggtagattcgcttgtggttggcgatccagccctcccgttccagcaggatgtgcagccgtcggtagccgaaccggcgacgttcgcccgccaacgcaacgagcctggcctgcaacggcgcgttcgccatgcgcggctggtagtgcaacacgctgcgtgacaagcccagtgcccggcaggcccgccgctccgacaggcccagcttcgcccgcacgtccgcgacggcagcccgtcgcgtcggcgggctcagtattttccccgcgccacgatcctcagcgcttcgttgtccaacatcgactcggccaacagctttttgagccgcgcgttctccgcttccagtgccttcaggcgcttggcgtcgggcacatccatgccgccgaacttgcgccgccacaggtagaacgacgcgtcactgaagccgtgcttgcggcaaagctccttgaccggcgtgccggcggccgcctgcttcaggaagccgatgatctgctcttcggtgtatcgcttcttcatgtccgtcctcttgtgagacggactctactaagatcaggttggcccggaaaacggggggcaggtcacctggtcggccactctcctgcggctgtgacagtgcaagttcttcagcacgctccatggtgcggctccttcgcaatgacagggatcagcgctgactgatcgatacgtaggtcagcgtcttgtggtcaagggagagcccgagtactaccttggcactgttcacctgagcagaccagtaagggcgggaatcaggcgcatccggatggggtggatacatggcggattcctcccagatgatttctccgagcgcgatgctcggtggggcaacctcaaagaccaaggtcgcgtgcgtaggatcgtcggcaggacttctcagcgtgatgttcttgatctcaagtccgcccagcatgccgcgttctgcggtccgctcgtccctcaagccttgtcgattcggttctcccaggtgtgtgtggagctgttcattcaatgcgtcgacatcatcaaaacgcaccttggtcaaacgctcgatatcgttcttgaaccgctccataccagtttcactccctgattcgacgggctgtttttgatttagatgatctgatgggcgtggcggcgcggcgattgaacatgctgccagcacaagcgccggaacagcgatcgcgaggcgacgacgcactgctatccagaggtagcgccgaattccacgttttgatgaagaagcgagtttctcgacccatgcattcatgaaagcgtctctcgcgccaacgtcacgctcttgaatctagcacagcgttttgtgagcacggatcgggttcccgtgaaaaatgagctactgaaaacgcacccggttccactttccagtttgaaaaacgcggcgtcagctgcgagggagggaacatcagacggaaggccgagcacacctccatgcgcgcaatccgatagttgaaagactgtagtcagtaggctacagtcctccatgaagatccagcgtacccgtcagttcgcgacatggattgacgctctcaaggacgtaaccgcacgcgctcgcatcctggcccgtatcggtcggctcgctgaaggccatccggtgatcaccgctatctggcggatggcgtttctggattgcgtatcgatgcaggaccgggttaccgcgtgtactacacccggcgcggcaggcagtgggtgattcttctggttggaggcgacaagggttcgcagcggcgcgatatagagacggccaaggagattgcgcgttccctgtgagcatcgaaccggctgtaggcgaaacgactcaataccgaagtaccggagctgtcccatcatggccatcaagagaaaagtcgaactcaaatcatttgatgtggccgagcatcttcggacgccggaggagatggcggcttatctcgacgcctgcatcgaagaaagcgagggcgattctgccttcatcgccaaggcgcttggcgatatcgctcgcgctcagggcatgagcaaggttgcgcgtgcggcaggcctgtcgcgcgagagtctgtatcgcgcactgtccggcgagcgcagccctgatttcgcgaccatcctgaaggtgacccgggccctgggtgtgcgattgcacgccagcgcagcataagcgcatgcgccgatcatgatgcgtcggcaccgcgtcggtcgaaggcggtggaacgaaaatgaaggaaccgcttttcgccggttttctcgccccaacccggtgagtcagctcaatgtgtgacgtgggcagatccttcgatcaacgccgcacacacattgcgaccaccgcagcctcagctacgtacctgcaacgccacatactcggccagcccccggcaggccagcatcagcccttcgcgcgtgccatcgccgatatcgtccttctcttccccgtccacgcgcacgcgttcggcggcgtgatatagctccaacagcgacaccagacccaccgcagcgcgatcccggcgtgcggcggccacggcctggccgggtgtgctggcgggccccgtccacggctgtccatcggcggtgtccccggcctggatgcgctgcaggcagccgggcaggttgatcggcgcgggcgcctcgttggcggcagcgaaagcggcttccaacggctgcgccagttcgggtggcaggcgcagcgcggcctcgcccagggtggcggtcaggtacgggtgatgggtcttgggcatgcgggcgtcctcgtcggcaacagaggtgccacccgaagagggtggcgggcgatgcgtggcttccaagaccggaaatcgatgagccggtgggcacggggcccccacgcaccgcccgccgtcgatcggcgaacggattgccagccggcgccgctctgggaagacggcgccggctggcaagcgtatacagcttcgattaaacgggcttggaagtcccggccacccttgcaggtggcgattcatcatgcgcacgtgaaatcaccgcctgccagtcgtttgtttcgatgacatcgggtgatctgaaaggaaaaatgaattatcgcgattggcccgtttcgagcatcgcaatgccagaagcgacatatcgcgcagtgccgtcatcatcggccatccgggccgcgccactgttgccgcacggcttacagtagcgtgcgacgtaaagctggcttaacagcctcggtaaggcaccaaggcaacgataccaggcgtgaatccccacgcgcgctacccggatcttgatattcctcacggaccgcccgcagcgcccaccgcatactgcggctacacgcccacctgggccccttcgggatccgcacatgcgtcgccatgccctgtcgctcaccgtcgcactggtgtccaccgctttcgtggccccggccatggccgcggtgccgttcttcaacgccagctgcccgggcggtatcgatgtgcacgccgacgaaggcggccccgtttacgtgcagggccgcgaggcggcgctgaaacgcttcaacgaccgctacgtcgaagcgcgcgatgccagcagtggcatcacgttgtcgatcagccgcagcgacgacggcacgccgcagatcagctataccggccgtggcggcgccaatggcatctgccaggtcagtgccagcggaacgccggcgcgggaagagcatcgcgatcgccgtcgccacgatgacgacagcgatgcggcgctgccgcgcgaggtgacctgcgaatccaccgaccagcagcaggtgtcgtgcgacatggatacgcgcggcaacgtggagatggtgcgccagctgagccacacccgctgcgaacaagggcagaactggggcctgtcgcggcactcggtatgggtgaacggcgggtgccgggcggtgttccgcaatgtgtccaaggtggcgtacagcgcgccggcgggtgataccgcgctgggctcctgcaatatgcgcaagggcgcgcagggcacgctggtgacccggatgccggtgggcagcgattaccaggaactgatcatcgattatcccgatggccgcttcctgtgcatgatgcgcaacaacggccaggtgcagagcctgacgccggttcgtcgccgcggcggttgagttcgccgtgggcgggggcctccgtcagccgcctggtgttcgcagcagcacccatgccagtatcagggtgaacacaccaatgacggtcaggccgaaccacgccgcggccaccttaacgttgccgatcaacgccgccaacatgcggtccagttcgcttgtcagaatcggatactcagcgtgcgccttgcgcagacgctgccaaccgaacgccaagaacagcagaagcgagaatggcgtcagcagcagcgccgcctgcatcagccagccgttcggcgacgcatcgatcaagctgttcaacagaaccgcaaaaaaagcgatgggcagcgcgacgatgaagaagcgtggccaggtggtgttgataaagggcgacatcacaatcttccatgaaaggcggcaggtccgtgcggcatcatgccatgccgtttcactgctgcaccgctgcggcacgccaggacggaggtcagcgcgggtttaccgggtcattgcccttcttgtaggtgtacccggtgacatcccagccgccgccatggccggacgagggttccacccaggtgaattcccacgtctgcagggagccgtcgggaagcaggttttccacccggtagatttcaccgggaatgccctgctccggcagctttcccggaatcgattcatccgcgcgtgcagacgcgcgccccaccgagaatgcacgccgttccacctgtacgttgccgtagccctgcggggcgaacgacggctttacccgctgcgccacccagtcgagcacctggcgtgcgctggcagtctgcatgggatacgcgtcggtggtcaccgtatgcgtgatgcgttgcgaggaggcattggcagctgccggaaacagtccgcccagggcaattgccagtaccgcaaatccattgagtgcatgtttcatttgcgtcgttctccagggttggggaaatgaagccgcaccgtccgggtgccgacgcagggtggacacaaggaccgccgtgggtaagaggcgatgccgactcgggtgtgaagtggatcaaggaagggcgggttcctgaccgctcagcgctggaatccctgaccggggcgcctttgtgctcgcggcgatccgggcattgccctgctgcaccgccgcgagtggtgtcacacagctctggctagactgtgcttctttttccccaccgcaggaggcacccatggcccatcccatctccgtatccctgattggcgttcccaccgacgtcggtgcgggccatcgcggtgcacggctggggccggaggcgctgcgcgtggcgggcctgccggaggcgctggaagcgcgtggtgtggacgtgcgtgacgtgagcaatctggatggcccacgcaacccgtggaccgcgccggtggaaggctaccgccatctggatgaagtggtggcgtggaaccatgcactgatggaagccagctacgccgagctgcaggccggccgcatgcccatcatgctcggcggcgaccactgcctggggatcggttcgatcaccgccgtcgcgcgctggtgccgcgagcagggcaagaccctgcgcgtgctgtggctggatgcgcactcggatttcaacaccagcgatgtcaccccgtcgggcaacatccacggcatgccggtggcctgcctgtgcggcctcggcccggaggcgctgacccacctgggcggcagcgcaccggcgatcaccccggcgcagatgcaccagatcggcatccgctcggtggacccggaggagaagcgcctgatcaagacccacaaggtggatgtgtacgacatgcgctacatcgatgagaacggcatgaagcgcgcggtggaggcggcgctggccggcatcgatgagaacacccacctgcatgtcagcttcgatgtggacttcctcgacccgagcatcgcgccgggcgtgggcaccacggtgccgggtggggtgaactaccgcgaggcgcagctggtgatggagatgatcgccgacaccgggcgcatgggatcgctggacatcgtcgagctcaaccccttgctggacaagcagaatgccaccgccgaactggccgtggacctggtcgaaagcctgttcggcaagtccaccctgatgcgcgactgagggcctggcctgaacggatcgccgatccgttcacacccgctccacgccgctgccgccagattgcactccacgcggcggcggtggcagtgtgccctcccgccgagcgacagaaccccatccgcgaatgaagcggtgtagcggcgaacccaaggagaagcccatgaagcgcgtagttgccctgatgctgttgtcgatgttctcggtggccctgctggccggttgcaataccgttgccggtgccggcaaggacgtgcagaaggccggtgaaaaagttgaggacgccgccaagggcaagtgagcccggcgcggattggaaagcgaaaaggccgggaatcttcccggccttttttgtgcgcgctgtttgccgcgtggctgtcgaagcggagtgaaccattcaagcaggtgagcatgtatttcattgccggttgaccggtactcaacagccgctgcgcgaagctggagccacggtaagaacgccgttgcaaccaaggactcccagcaatgaacaaagacatcatttccggcaagtggtcgcagctgaagggcaaggcccaggccaagtggggcgatctgaccaacgacgacttcgatgtggccgaaggtaacgccgagtatctggccggccgcctgcaggaacgttatggctgggccaaggaccgcgcggagaaggaagtgcgcgagttccaggacgcggtgagcaaggactacccggactacaagtaagcgcttcggtttcccccacaacacgacgcccgcaccgtgaggttgcgggcgtcgtgttgtctgcgccggacgatcagcgcgtcggcgggtccggcacgtagcggttggggaacgcctgcggttcgcgcggcaggcgcgagggcgaatccaccaggatgccgcgcgcacgcaggttgcgggcgctgtcgtagcgcaactgcaatacctgtgcggggctgcggctggcgcgctcgaagtcggtatcgcgcaccgaggactgctcgcgcgcaccatggccggtacccagcgctggggcctgcgacttgctggcgtagccttcgatgcggctggcattggcactggcatcggccgccgcttcggccgccggggccggcagcggcaggccacggcgcaggatcggctcagggcgccagcgacgtgcctcttcgaacaccgccacgcccacaacgccgatgttgtccgggcggccggtgcggctggcatagctgccgctggggctgctgaacacgaactgcgccacttcgtcctggctcttgcgccagccggtgatgtcggcgcgctggccggggttgagcacgtagccggtctgcgagggatcggcatcctcgccggagatggcgttgacgccgtccaccgacagcaccaccagcacccggcgcgggctgtcgttgtacaggcgcacggcgtagcggtggccgcgctcgccggccacccagcgctggccgtcggcggggtagctgcgcagttcggtgccacggtcgcggtcgaccagggtcatgcgcaccgggccgccttcgtaggccggtggcggaggtggcgccgggcggaagccggccaggggcaggatcagcagcaggggcagcaggcgtttcatcgggcgtctccagcggggttgggtgaatgaacgcgccgcaggccctgacggggttggtggcgtgcaaggtaaactggccccgttcatcgaaggttaccccacgcagtcatgacgacccgagtccttaccggcatcaccccctccggcacgccccacctgggcaactacgttggcgccatccgtccggccatcgccgccagccgcgcgccggggatcgagagcttcttcttcctggccgacctgcacagcctgatcaagtcgcaggacccgcagcgcacccagcgcgcgaccctggagatcgcggccagctggctggcctgcggcctggacccggagcatgtgtggttctaccgccagagcgacatccgcgagaccaccgagctgatgtggttcctgaccgccatcgccagcaagggcatcctcaaccgggcgcacgcctacaaggcggcagtggacaagaaccgcgaggaaggcgtggacgaggacgcaggcgtcagcgccggcctgttcatgtacccggtgctgatggccgccgacatcctgatcttcaaggccaaccaggtgccggtgggccgtgaccagatccagcacatcgagatggcgcgcgatttcgcccagcgcttcaaccacgtgtacggcaaggagtacttcccgctgccggacgtggtgatcgatgagcaggtagcgacgctggccggcctggatggccgcaagatgagcaagagctaccacaacaccattccgctgttcgtgccgcgcgaggagctgaagaagctggtgttctcgatcctgaccgattcgcgcgcaccgggtgagccgaaggacaccgaaggctcggcgctgttccagatgtaccaggcgttcgccacgccggaacagaccgcagagttcgccaaggcgttcgctgccggcatcagctggggcgacgccaagcagcagttgttcgagcgcatcgacagcgaactgtcgccgctgcgcgagcgctacaacgcgctgatggccgagccggagaagatcgaagcgctgctcaagcgccgtgggcagcagctgcgcgagcagttggcggcaccgctgctggaagaactgcgccacgccgtgggcctgcgcgacctgtccacggcgggcaacatcgccagcgaagatgccggcgtggcccgcgtggcgccgccgcagttcaagcagtaccgcgagaaggacggccggttctacttcaagctgaccgccggcgacggcacgctgctgatccagagcgaaggcttcgattcgccgcgtgatgccggccagctgattgccgtgatcaagcaggccgagcagggcgaccagctgcagagcgagctgttcaagctggacgccgaggtggacgccgtgctggccgcgctggccgtgctgcgcgaagcggcctgatcgccgggcctgcctgccctttgtagagtcgagccatgctcgactttgctccgcccctgtagagccgagcccgtgctcggctgggtagcaaagcagccgagcatgggctcggctctacagggacgccccccgccggcacgaccgtggcacagcacccatggcatgatgtccgcgcgccgccggcgcgatgacatggagtctgcgatggcctggttgtcgctgctgctgttcctgccctggttcctgctgctgggcagcctgtactggctgttcccgcgccagccgcgcagcgcgcggcggcgcctgttcgatggcaccaccctggtactggcgttcgcgctgagcattgtgtcgatgctgtggggctaccgcatcggcgtggtgcaacccggcgccggcccgatctggccgcaggtgctggcggtgctgtacgcctacggcgcgttcctggcggtgctggtgctggcgttgctgctgcgaccgcgctggctggaccggtaaccccgcctttgtagagtcgagccatgctcgactgcacgcgccctctgtagagccgagcccatgctcggctgatgtctggcagaaaggcagccgagcatgggctcggctctacggaatctggactccgaccaaagccgcatcgaacccgggccgcctgcgcgcctaccatgggcgtctgttcccgatcctgccaggtgcgtgccgatgaccgccgaccccagcatccacaccatcgataccggcttccagcgcccggacttcgacgcggcttacctgatcgttgaaaacggccgcgccgcgtttgtcgactgcggcaccggcctgtcggtgccggcgatgctgcaggcgctggcggatgccggcctgggcgtggaagcggtggactggttgctgctcacgcacgtgcacctggaccacgccggcggcgccggcctgctgatgcagcagctgcccaacgcaaaggcggtgctgcacccgcgcggtgcgccgcacatgatcgacccgacccggctgatcgccggtgccacggcggtgtatggcgccgacgagatcgcgcgcagctatggccgcatcgaggcgattccggagtcgcgcgtggtggtggccgaagacggccaccgcatcgatctggccggccgcgagctggtgctgctgcacacgccgggtcacgcgctgcaccactattgcgtatgggatgcgcgcagccgcagctggttcaccggcgataccttcggtatctcctaccgcgagctggacagcgcgcagggcgctttcatcttcccgacctcctcgccggtgcagttcgacccggaggcgatgaaggcctcgatccagcgcatgctgggctacggcccgcaggcgatgtacctgacccactacggtcgtgtggaacaggtggagaaactggccggcgacctgttcgagcagatcgatgcgatggccgccatcggccgccagtgcgacggtcgaccggaccgccatcgttgcctgttggccgcgttgcaggcgctgtatctggaacgtgcacagctgcatggctgtgcgctggacgatgcggcagtgaccaccgtgctggcgatggatatcgagctcaatgcacagggcctggcctgctggctggatcgcatcagcaggtagatccacgccctgcgtggatgacgcaggcccaagccgcgccgtgatgtcacgaccacgttacactctggtgacttccaagctagccgtggtactgccgtgaatccgatgcgcgtgttgctgctgtcgtcctgcctgttcgtcggtggccttgcccatgcggccaacgacctgccgggtggcggcatcgatccgcaggcgctgtcgcgccatgtgcgcgttctggcgtcggatgaattcgagggccgcgcgccggccaccgagggtgaagagcgcacggtgcagtacctgatcgagcagttccgcagctacggcctgcagcccggcggcgtggatggcagctgggtgcagccggtcccgttggtgcgcgcgcagctggacggcccggccaaggccagcctgtcgctgaagcagggcaagcgtgcgctggccaatggcgtggacgtgaccctgcagagcctgcagccgcgcaagcgcgtgcagatcaggaatgcgccgctggtgttcgtcggctatggcatcgacgcgccggaacgccagtggaacgactacaaggacgtggacctgcacggcaagatcgccgtggtactgatcaacgatgccgatttcgaagccgatgcaccgggcgcattcgacggcaaggcggtgacctactacggccgctggacctacaagttcgaggaagccgcacgccgtggtgccgaaggcgtgctgatcgtgcacgagaccgcgccggccgcctacggctgggccacggtgaagagctcgggcacatcgccgctgttcgacatcgagcgcggccaggacgaggcgatggcgcagcacacgccgctgcgtggctggatgcagcgcgagctggccgaggcgattttcgccgacgccggcctcgacttcgatgccgagaagcgcaaggcgatgcgcgccgacttccgtcctgtggcactggacaacgccaagctgagcgtggacttcgcgctgaagcgcgagcaggtggtgacccgcaacgtggtggccaagctgcccggtggcgagcatggcgacgaggcggtgatcttctctgcgcactgggatgcgttcggcatcggccagcccgacgccaagggggaccgcatccgccgcggtgcgatcgacaacgccaccggcgtggccacggtgctggagctgggtcgggtgttcgctgccggcccgcagccacagcgcacgctgtacttcgtggcactgaccgctgaagagaagggcctgctgggggccagctactatgctgcgcacccgctggcgccgctggacaagaccgccgcggtgctgaacatcgagatgttcagcccggatggcccgacccgcgacatcgcgtcgtggggcaaaggccgggtctcgctggaaggcgacctggaacgcgtggccaaggcccgtggccgcagctacagcccggacccgaacctggaagcgggcttcttctaccgcgctgaccacttcgccttcgcccgcctgggcgtgccggcaatcaccatcggcccgggcctggacaagctggacggtggggttgaagccggccgcgcgctgcgcgagaagtacttcgccgattgctaccaccaggcctgcgatgcctggacgccgcgctgggacccgagcggccacgctgccgataccctgctggtctacgatctgggcgcggagctggccaacagccgccgctggccgacgtgggaaaaggaatcggagttccgcggcgcgcgcgacaagagcgaagcggcccgccgctgaggtagtgccggccgctggccggcaagtccctgctctttccggaggttcatgaggttgccggccagcggccggcactaccaaaagaaggtggcgttgccggccagcggccggcactaccaaaggaatgtggaggtgtcggccagcggccggcacgaccgggtgttcgtcagcgccggcgcagcagcttccacgcgccccagccgctggcggcgagcgctgccagatagcacgccaccatcgtgcgcaggccgaccagcgatccgccgttgacgccgcgatgcaggcgcagttgcagcgagctgtggccgctgcccaggtccactgccagctgcagcgccagtgcggcgcagaacagcagcagggcgatcccgaaaccgatgcgtggccatgcggcctgtgcgctggggcggcgcagcagccaggccagtgccgtggctgcggccagcgtcaccgcgatccacatcagtggaggagcgggagacgcagcggccaccggcattgcaccggtggccgcgatcagggcaacgcgcttacttgcgggtgccgtcgagccagttcgggcccttgttggtgaggaagaacacatagaccaccaacgataccgcgatcgtggcagtcacgtagagggcgaaccaatcgacgtggccggtcttcagcgcgccctggtacagcagcggggcggtgccgccgaacagcgagttggccagcgcatagcccaggcccacgcccagtgcacgcacgtgggtggggaacagttcggccttcaccaccgcgttgatggaggtgtagccggtgaggatgacgaacgccagcgccagggtcaggaaggccagggtggcgtcatgctggtgcggcagctgggtgatcaggtaccagctgtacagcacgccgccgacgccgaagaacaccagcagggtcttgcggccgatgatgtccgacagccagccaccgaccggctgcagcaccatcaggaaggccagcacgcccagattgatcagggtgccggtcatcgggtcgttgccggcgaaggcgctctggatcatcttcgggccgttcaccgagtaggtgtagaaggccacggtgccgccggcggtgatcaggaagcacagcagcagcggtcgccactggtgcacgaacagctcgtacatcgagccggacttctgcgccttgccctcgcgcgcggcctcgatggacgactccgacagcgactcgtccatgccacggcgcagccagaacaccaccaccgcggcgatgccgccgatgccgaaggcgatgcgccagccccactcggagatttccggcttgccccagaaggtcagcatcagcagcagggtcagctgggccagcacgtggccgccaaccagggtgacgtagtggaaggacgacaggaagccgcggcggccgggaatggcggcttcggacatgtaggtggcgctggcgccgtactcgccaccggtggcgaagccctgcagcagccgtgcgaacagcaggatgaccgcggcccagatgccgatgctggcggcggtgggggtgatggcgatcaggaacgagcacagcgccatcagcgtgaccgagacggtcagcgccaggcggcggccatggcggtcggcgaatcggccgaagaaccaggcgccgatcgggcgcatcaggaaggtcgcggcgaagatcgcccacacgtacatcgtggagttcttgtcgtcgggcgagaagaactgcgattcgaagtacacggcgaacaccgagtacacgtagacgtcgtaccactccaccaggttgccggcggagcctttgagggtgttggagatcgaccgccgcagggcggcgcggtcgttcgcggggacagcaggttggggcgtggtgctcatctgggtgggaatcctcgatgcggcgcgtccgtgcgcagggaaaacggcgcccggccttggggcggcgcggccgggcagccctcttggtactgcatcgaccgtcaacacggggtagcagaccagagcagggtgcatggatggatgacagcgtgccaccgcatggggtcccggaccatactcaaaacgtcctagaatccgccttcccccggctccctggtgtgtcatgtcggctcccccctcttcgtctgcggctgcccccccgggtggccttgtcgcgctggcactgctgctggtctacgtggtctggggctcgacctacctgggcatcgccaaggccctgcacggcggcgcactgccgctgacgatggtctccggcagccgcttcatcattgccggcggcctgatgttcctggcgctgcgcctgttctggaagctgccgaacccgaccctgcggcaatggcgcaacctggtcatcatgggcgtgaccatgctggtgctgggcaacggcatggtggtgctggccgagcgcgaggtgtcctcgggcctggccgccaccgcggtggcctcggtgccgctgtggatggcactgttctcggcgctgcgcgggcagcatgccagccgcggtgagtggctgggcatcgtcatcggcttcctcggtgtggtctggctcaatgccggcagcagcctgaccgcctcgccgaccgggctggtgctgctgctgatcgcgccgatcggctgggccttcggttcggtgtgggcacgcgggctggacctgccgggcccgttcatgaccgcggccgggcagatgatctgcggtggcgtgctgctggtgctgatcggcctggcggtcggcgagcgcccgagcacgctgcccgataccggtggcctgctggcgatggcgtacctgtgcgtgttcggctccatcgtcgcgttcactgcctacgtgtggctgctgcagaacgtgcgtccggcgctggccggcagctatgcgtacgtcaacccggtgatcgcggtgctgctcggcgcgctgctcaacggtgaacgcttcggctggcgcgacctgctggcgatggcggtgattctcctgggtgtggtggtactgacgatggcaaggacgcgaaagagatgagcatggacgagaaagaacaacgccggggcctgctggtcaccgcgtccaccttcgtgatctggggcctggtgccggtgtactggcacctgctcaacgaggtgccttcgttccagatcatcgcccaccgcatcatctggagcaccgtgctggtgctgggctggctgctgatcagctcgcgcctgggctggtggcagaagatcgccgcgcagccgcgcgcgctgccgatcctgctggtgtcgagcctgaccatcgccttcaactggggcctgtacatctgggcggtcaacgccggtcatgtcatcgagaccagcctgggctacttcatcaacccgctggtgaacgtgctgctgggcgtgctggtgctgaaggaacgcctgcgccgcctgcaatgggtggcggtggcgatggcggcggtgggcgtggcctggctgaccatcgacgccggcacaccgccgtggatcgcgcttggcctggcttgttcgttcggcctgtatggcctgctgcgcaagctggtctcggtcgacccggtggccggcctaggcgtggaaagcatgtacctgttcctgccggcgctggccttcgcgatctgggcggaaaacggccatggcggtgcgttcttccatggctggggctggcgcaacgacctgctgctgatcttcggtggcgcagtcaccgccgtaccgctgatcggctttgcctacggcgtgaagcgcattccgctgtcgctggtcggcatcctgcagtacatcgcaccgagcctgcagctgctgctgggcgtgttcttcttccacgaagcgttcgataccgccaaggcgatcggttttgccgcgatctgggccggcctgatcctgttcgtcggcgacaacatccgcacgatgcgcgccaagcgctagcgccggcggggctgcggggtcggatccctccgcaacgcggagggctctgaccctgttctatccgtcgcgtggggtcagagcccttcgcagggcgaagggatccgacccgcttccacccaaaaaagaacggcgccccgaggggcgccgttctgcttccgtccacggccaggagagagggatggccgtggcgggaaggcggttgcaggcttagaagcgctgctggtacttcatgtacatgaagcggccgatgtcgaagccaccgtagtaggtgaagctgctgttcggctggctgtacatgatcggaccctggtggttgaacacgttgttcacgcccagcgacacggtgccatcccacggcaggctgtaacgcacctgcaggtcgtggaaggtgttggagcccaccttgttggtcggcgacgcgctggtgtacgacgagttgaagcccggcatgttgcactcatccatgtacgagcacttctccttcatgctggagtagtagcgcgcggtccagccgatgccgaggtcgccgtactgccaatccagattgaaggtggagcgcacgcggaagtcgccggcccaaccggtacgctgttccaccggggtggtggcggcgctgtcgttgcgctgctccaggtagtcggtgtaggtggtgttccagttgacggcgaacttgccgaacgcggtttccggcaggcggtagcgcacgttgatgtcatagccggcggtttcgcggtagcccgcgttgaccagcgagcggtccagcgagttgacctggccgttgctgccacgggtgaagcggccgcaggcggcatccgaaccctgcacgtagcactgttccaggatgttggtggccgactcaccgacgatggcgttgtcgatgcggatcttccaccagtccaggctgacgtccaggccctgcacgaagtccgggctgtagaccaggccgacggtccaggtcttggcggtttccggcttcaggcccgggttggagcccgagctgaaatcggtggtggcctgctggccgggcttggtggccacgctgccatcgctgttgagctggcggaagttggccggcaccttcagcgcctggcagcgggcagcgacggtcgggctggtggcggcggtaccgaaggaggtatcgcacggatcggtgaacgagtcgcggctgctgacggtgccgccgtacaggtcatccacggtcggcgcacggaagccggtgccgtaggtggcgcgcaccagcaggctgtcgatcggcttccacttcaggccgaacttgctgttggtggtcgaaccgaagttgttgtagtccgagtagcggccggccatgtccagcgacagttcgcgggcgaacggcaggtcggccagcagcggcacctgcagttccaggtagacctcgttgagcgagtagttgccgcgggtcggctggccgctggtgccggcgatctcgcccttctgcaccatcgtgtccggagtgtagccggcttcttcgctgcggtgctcgaagcccatcgcggccaggatgtcgccggccggcagggtgaacagcgagccggagatgttgccgctggcgaccttggtggtgctctgcatcttgtcgacgaagcgggtgaacaggtagtcctgcacgtcctggttgctcagcgagccgggtccggtgtaacccatcggggcggccgggttccacggcacgcagccggcgatcaccgcgcccggcgcaccgcagcgggccacgttgccgtccatgaaggacgggccgacggccaggttgacgtgcggctggtacatgctgccggtaccgatgcgctcgccttcgttgcggttgtacatgtagctgacgttccagtcccagtaccgcgaaccggtttcgaagctgccttccagaccaatgctggcgcgcttggtttccaggttgttctcggtgccgcgcggcagttcctcggtacggtgcgcgaacagcgcatcctggccccacaggttgaacgcgctgtccttggacagggcggcacggctgccattgcgggcctgcgcggcgctgaccgagtacgggtaaccggccaggtgcttggtcgactcgcgcttgctgtacaacgcgtcggcgacgatgcgcaggttgtcggtgatcgagaagccaccgttggcgaacaccgaggtgcgttccaggccggtcagcaggctcatgttcgacttggtgttggcaccatcagccgggtccggcgcatggaagttgccggccttgcccgggtcgccgcccgggcccaccgtcaggttcttgccaccgacggtgacgtagccccacggggtattgccattgaggccatcgttggggtggcgcgggccgttggtgtaacggctgaacgcgcggtccttgcccagcacctcatcttccttggtgcgctcggcgcccacgctgaaccagccgcgctcgaaggtcttgccgaaggtcgcgctgtaggcgcgcttctggccgtcaccctggccgtactggccgacatagacgctggcttcgccaccatcgaaattcttgcgggtgatgatgttgaccacgccggcgatggcatcggagccgtacagcgcggaggcgccgtcggtcagcacttccacgcgctcgacgatggacgacgggatcgaggccaggtcggagtaaccgccggcgctgatgcccatgcggcggccgtcgatgagcaccaggctgcgttccgggcccaggttgcgcaggctgacgtacatgccgccgaagtcgcgcgaggaggtcagcgacgaggcgcggctcatgctcggcgcaccggcggcaggaatgtcctgcaggatgtcagcgacgttgacgtagcccttcttctcgatatcggcgcggttgagcgcgaccaccggctgtgcggtttcgacactggcctggcggatgcgcgagccggtgatttcgatgcggtcgaggttggtcggggtatcgccggcgctctgtgcgaaggcgggggtggtgcagctggcggccagcgcgatgacgatcgcgttgcgcagcggattggttttcagggacatccgtgaaatctcgtgtttcagtaaaaacaagcgcccgttctatgggcgcgtggggtgctgcaaaccaacgtggggggcgcgattctagaatgtttccattcgtaactgtttgtctcggcgccgctggaagtgcgcgaaaatgaatcgcaaccaacaatccacagatgggctgtgcgcagcgtcacgcgcgctgcgtttgcgatgggcagaggcatcgatagcggcacgaagctggcacgcttgagtggttgcgacaacgcgtcgcagtacgcgcttgtatgcaggcgcgcagccgttgtgatgcacctgcccgcatgaaatgctcttcgccttgtcatcgaaggcaggagacgaaggaatgatccagcttgaagaagcacgccgtcgcgtggaggctgcacttgccagcgacgatgagccggttgccatcacgcatgagcacgaagtggtcgaaggctggctgttctgcttccagtcgctgcgctacctgcaatccggcgaaatctcggatgcattggccggcaatgggccgatcttcgtcgaccggcacacaggcgagcagcacgcgctgggcacggcgtatccgcccgaggaggtccttcgccagcatctggccgcgcgcggccccgccgtctgatgctgcggcggcggatttctgagttcggcaacgtgaaagggacggagccttcgctccgtccccttgcgtgatgcgcagtccaccgctgcgcgatgctcaggtttcgcgcagcgccgtggtgatcggcaaacgtgccgcgcgcagtgccgggaacaggccgccgaccaggccgatgcccagtgcccatttcaggccggtccacagcagttccggcgacacatggaacttgaacaccaccgcgctgaagttgctgccgatggtggacacgctgtagccattgaacagcagccacgccaccgcacagccgagcaggccaccgagcagcgccagcagcatcgtctccagcatcactgccgtcaccaccggcaggccgcggaagccgatcgcacgcatggtggcgatttcgcgggcgcgcgtggcgacggccgcatacatggtgttgagcgcgccaaacaccgcaccgaccgccatgatcgtgccgatcaccttgccaaggatgtcgatcaacttggtcagcccgccgccctgcttgctgtagtacacgcgggtggtttccacgtccagtttcaggcgcgggtcggcggcgacggcggccttgaactgatcgaagcctgccttgccctcggtgcgcacgctgatcgactgccaggcgctgcgctggtaggtggtggccagcgtatcggcgtcggtccacagttccgaatcatgcgcatcgccggtggcgaacacacccaccacggtccaggtctggttgcccagggtcagtgtcctgcccacctccatgtcgcggaactggcccttggcgccctggccgaccacgatctcgcgcaggccagtggcgaacttgcggccctcgacgatcctgaccttgtcatgcaccgcccacgcctgcgggcccacgccgcggaactgcgcgttgacgtcggtgccatcggacttcgacaccaggttgaccacctgcgacagctccggcgacagcagcggccggccctgcgtatcgcggctgatgccgggcagggtggacagcatcggtacctgctcgcgggtgatcactgagttggtctcggcctgcgagccaccgcgcagcacgatggcagtggtgtcatcgccggtgttgttgagcgtggcctggaagccttcgcccatcgccagcattgccaccagcacgccgaccacgccggcgatgccgaccacgatcaccgaggacgcgccccagcgctgcggcaggctggccacgccgatacgggtggcggccagcgccagtcgccccccgcgggtcagcagcagccacagggccaccaccacggtcacggccagcacgccggtccacggcaggctgatccacagcaccaggccgaccgccagcagcagcaccgtcacgccgttgcccagccacttcttgagtttgctcttgaacatgtctgtgttctcctcagcgaccggccagtgcgtcgacgatcttcaggcgcttggcacgcagcgccggcaacaggccgacgatgatgccgatcaccacgatcaggcccagccccatcagccaggttggcgtcggcacgtgcggcggcagcatgcccatgctcttcgggccgatggccggcaggatcagggcggccaggcccatgccgatcaggccgcccaggccgatcagcagcaccgattccaccatcaccagggtcagcacggtgctgtccttgaagcccagcgtcttcagcgtggccagctccggcacgcgctcgcgcacggcctgcgccatggtgttgccggtcaacagcagcagggtgaagaacaccgcgcccatgatcgaggtgacgatcatgccgatatccgcgaactgcttgacgaaggcctgctggaacgccgattcggtctgggtcttggtctcgtggtcggagttggccgagatcgcgtcgatcgcctgcgccacccgcgaagagtggtccgggttgtccagcgttaccgtgtaccagctcacctggttcttgatgtagtcgttggattcatcgaagtacttccagttcatcatcaactggcgttcttcgttggcggccagcgcacggtccttggaacggtagatgcccttgagcaccagcggccagtcgttgctgccgccacgcgggaagatcgtggcctgcagcgggatggtgtcgccgatcttccagccgaactgcttggccagggtttcgccgacgatggcgccggtacgggtctgcttccagtcttccagctgggccgggtcgatctgcagctcgcggtagacatcgaagtagttgggggacaccgagaagttcgggaagaagttcttcgggtcctggtagatgccgccgaaccacatgccataggccacgtcgcgcacgccggccacctgccgcacctgggcttccaggcggatcggcagcgactgggtgatcgacagccgcgatgcgaccaccaggcggttggcgccttccacgctgccgccggaggtgaatgccacgcgcaccgaatcgagcatgccgaacagcaggaacgcggccaccacggagagcagggtcagcaacgtgcgggtacggctgcggaacagctgcgcccacaccaacgagaagtatttcatcgccgtggcctccgtcagtgggccagcggcgcgtcggccagctcgcccttgtccaggtgcaccgtgtgcgtggcgtactcggcggccttcgggtcatgggtgaccatgatgatggtcttgccatgctcgcggttgagctgctgcagcaggccgaggatctcctcggcggactggcggtcgaggtcgccggtcggttcgtcgcagatcaggaaggtcgggtcggagacgatcgcccgggcgattgccacgcgctgctgctggccgccggacagttcattcgggcggtggctgcggcggtcggccaggccgaccagggtcagcgcgatctcggcgttgcggcggcgctgcgccgcattgaggtgggtcagcagcagcggcagctccacgttcttctgcgcggtcagcatcggcatcaggttgtagaactggaacacgaagccgacgtggtggctgcgccaggtcgacagctggccgccgctcatctggtcgatgcgctcgccctcgatgctgatctcgccgccgctggggttgtccaggccgccgatcaggttgagcagggtggtcttgcccgagccggacgggcccatcagcgcgacgaagtcgccgctggcgatgtccaggtcgatgccgtgcagcacctgcactttctcggggccacgctggtaggtcttggtgatgttgcgcagtgaaaccagggtcgacatgggtggttctccacggaaggcgggaaacggggaagcgccacggcaggggccgcaggcgtgcgtcgagcggtgctgccggcggcgcccgtgggcgccaggccgctactgcgcttgtttctgttgcaccttggcgccatcgcgcagggtgtccggcgggttcagcaccaccgattcacctgcgctcacgcccttgaggatctggcggtccttgcccatcgcctggccggcctcgaccgtgcgctgctgcacgcggctttcgtcacccagcacgaaggcaaccgaggcgccctcgcgctggaccacggcgcccgccggcacgcgcacgccctgcggtttggcggccgcctgcggctgcgcctgttccaggaagctgacgcgcacgcccatctccggcacgatgcgcgggtccttcaccttcagcgccacgcgcaccttcaccgtggccttgccgcgatcggcggtggggatgatggcgatcacctcgcccggaatcttccactccggataggcgttgagcgtggcttcgaccggcatcttcggctgcacgcggccgatgaaggcctcgccgacctcgacttcgatctccagcgagtccatgtcgacgatggtgccgatgccggtacgggtgaacccaccgcccgccgacagcggcgagacgatttcgccgggctgcgcggccttggcagtgaccacgccggagaacggcgcgcgcacgatgttgttgtccacgcccagatcggcgatggccagctggtcgttggccaccttgacgttgcgctgtgcggtgtccagctgtgcacgcaggctgtcacgctgggccaccgcctggtcgtactgcgagcgcgacaccagctgctggccgaccagtgcctgcaggcggctggcttcagcggccgcctgcctctgctgcgcttccagcccggccacctggctgcgtgcggcctgcagctgcgaggcatacaggctgcgctgcgcgtcggcatcgatcgggtccagcgtggccatgatctggccctgttccacgcgcatgccttcctcgatcatcacctcgcgcaccttgccggtgatcttggccgataccgtggccatgcgccgggcgaccacgtagccactggcatcgagcaccgaactgctggcgctgccctgctggatggccacggcgggggcggtttccacgtccactgccggcgtacgcccgaacagggcgaagccgacagcggccagcaacaacacgaccacgatgatcgcgatccacagccagcggcggccaccgccactgccgccggaggcgggcggcggcgatttgcggtcgatacggagttccttcaacagctcggcagaagcgttcattcgttccatcacaggcgtttgggcgggtgtggccggaagggcggacggcggcggttccggcggtggagcgtgcggcacagcatgaaggcaggcacagcgatgacggcagtgacagctgtcacccgatgacactgacggcggcaactgcgaaacgtgaccacggcggcacaggatggcaacgtccccgctaccggtaccgcccatggatccgatcaccccgtcgctggcccgccacagccgcgccgccaagcgtagcgtgatccgcgctcggttgcgccggtgccgcccggccggtggtggcgcctgcgcgcaggcggctgaactggcatgatcggcggcgatcgtccccgcctggaaccgcccgtgccgtcgacatggcttgcctcgctgctgcgccccgcgccggactcggcggtggccgatacgctgcgccggggaaaatcgccctggagcgaggcagtccacctgctgtggtcggtgtggatcttcctgacgcccttgcttggccacggcttcaccctgcgctggctgctgctgacgctggccagctatccggtgttcctgctgctgtacgccaaggtgatggtggcgccgcgccatcacgctccgcgctatgcgctgggcctgatcgcgatgtcgctggtgctgctgccctggtatccgtccgggctgacctacttcgtgttcggctgcgtgctgctgcgggtgagcggacgcggtggctggtggcagtatctgctgcagctcactggcctgaaccttctgttctgcagcctcgcgctgctgttccagtacccgtggcagagcctggtctggatcccggccgtgtcctacatcgtggggctggtcgtgaacgtggaagcgctcaaccagcagaaggatgcggcactgcagctgtcgcaggacgaggtgcggcggctggcggccactgccgagcgcgaacgcatcggccgcgacctgcatgacctgctcggccacaccctgtcgctgatcacattgaagctggagctggcgcgcaagctgcacgaccgcggcgacgcgcgcgcgcggctggagatcggcgaggccgaggccatcgcccgcgaagcgctggcacaggtgcgcagcgcggttaccggcatccgcgccagcgacctggccggtgagctggcatcggcgcggctgctgctggaatgccagcaggtccaccttcaatacgcaccaccaccggcgatgccggtggatgtcgaacgcgggctggcgctggtgctgcgcgaggccgcaaccaatatcgtgcgccatgcacaggcgacacaggcacgggtggagttcatgctggagggacgcatgctggcgatgcagatccgcgacgatggccgtggcggcgtgcaggccgagggcaacgggctgagcggcatgcgcgaacgcgtggccgccctggggggcagcctgcaggtacagtccgcaaagggcgagggcacgcgactgaccgtgcgcgtgccactggctgccgcgaccacaccgttgccgccgggagcgccgccgtcgctggcacaggacggtgccgcatgatccgcatcctgctggccgaggatcaggcgatggtgcgcggtgcactgtcggcgttgctgggcctggagccggatatcgaggtgctgggcagcgccgccgatggcgaaaccgcgtggcggatgctgcagcagctgcaaccggacatcctggtcaccgacatcgagatgcccggcctgtccgggctcgagcttgcccagcgcatcgcgcgccacgagctgccgatcaaggtggtgatcgtgaccaccttcgcccgcgccggcttcctgcgccgcgcgctggaagccggcgtgctgggctacctgctgaaggatgcaccggccgagaacctggccgatgccctgcgcaaggtgaaacagggcatccgcgcgatcgacccgcagctggcactggatgcgtggtcgcaggccgatccgctgaccgaccgcgagcgccgcgtactgcggctggcgggcgagggccgcaccgccagcgagatcgccgagcagctggggttgtcgcacggtacggtgcgcaattacctgtccgagtgcatcggcaagctgggcgtggccaaccggatcgaggcgtaccggctggcgcggcagaaggggtggttgtaggggcgtcctgctgttcccggtgatttcgtttccgcgaccacggagggatgtcactttctttgcgcgcaaagaaagtaaccaaagaaacgctccgccggccgcgagccggcgtgcttcgcacgccggtgccctgcgctcctcggtccgtcgagggacggcgcgggaactcgctgcgctcagacacccgcacctcttcgccctcgccggacctgcggtgctcggctcgctcaaggcggactggaagggcaagagcatccacgcacgtcgtggatctactgggtgcagctgtggcctttgacgttgggtccgccttctagcgagccgagcatcgcaggggaatcaggggcgcagaggcgccgatgtctgagcgcagcgagttcggcgccgtcccctgattcaccgagaagcgcagggaaccggcgcggagcgacggctcgcgatctggcggcgtgtttctttggttactttctttgcacgagcaaagaaagtgacacccctccgcgggcgcggaaacgatccgccgggcatggcccggcgctactcatgcgtgggcgcagaggagctcgctctcaatccttcccgcgcgccatcgcctggaacaccccgtcacgctgcacccacaggtggaacagcgccgcacccacatgcatcagcaccgtggcaaacaacacataggccagcaggctgtgcgcattgcgcaacgcggcatacagcgccggggtatgcggcacgatcggcggcaggtgcaggccaccccacagcacgatcgggtaaccgccggccgacagcatcgcccagccgatcagcggcatcgccagcatcagtgcgtacagcatccagtgcgaggccttggccgccatcacctgccacacaggaagatccgccggcagcggcggtgggcgatgacgcagccggttgtacaggcgcagcaacaccagtacgccgatagtgatgcccaatgggcggtgcaggtcgatcagcatcggccgcaggtgcagcgaggcgaccatggtcacgccaatgaacagcatggcgacgatcatcagcgccatggaccagtgcagcacccgcgccagcaggttgaagtggccgttgccggtgctcatcgtgcggcctccttccgttgctcgacgttgccggtggcgcgctcgcgttcgcggcggttgaaggactgcgaatacacggccgagcgggccgccaggatcggatcgtcactgccacgcacgccgctgggcaggatcagcggatcgaaattgatctgcccgcaggcgccttgttcctgcgactgcatgcggtccaggctgagtacgccggccactacctggtcacgcgattcgggccacggtaccgacggattatcgatggcatcgccaggctcggcggtggtcacgaccaggttccagcgcaccgggccgctggccaggcgctgctgcagttcctggctgaggaaatcgacgctggcctgcttgcgggtttccgcatccatctccaccaccggcgcctgcggctgccagcgccagcgcaccgcgcgcttctggccctgcgcattggtgaaccagaagctgttgacgctgttgaaggtggtgtcggcccagctgctggtccacggcgcggtcttggcccactgctggaaagcctgcgcactggggtatttggccagcaccgcggccatcttctgcggatcgggcttgccggtggccgggtcgggaatggaggcgcgggtctgctcgtagaacgcctctgcgctgggcacggcgaagaacgggaagctgttcatcgccatgcgccattcctggccatcatcgctgaccatctgcaccgcgaggctgcgcacgcgtgcggtgttgtcggcgccgtaggggtcgccgccgccgatcgacaggcggcccatcaccggcacgcggcgctgcgagaacacccgtgcgctggacagggtgggggcctgcgcgctgggttcgaaccagccgctcacgcagatgcccttgctgtgcgcgcggcggaagcccgggtgggccgggccggtggcctcgatggtgtcggtgaagcgctgcgcggtcaggcggtttccaatccagccggccagccaggcgaaggccagcgcgacggcacccagaatgagtgcgatcagtgcgatccagagcaggggggaatgcttgcgtggcgcgcccggcgtctggccagcgcgggtgtagcggaagagcgacatggtcggagtcctgccttcacggagcgtgtgggtggtcgacctacacatcctcgcagaacccggccggggccgaaattcaatttttcgtcagattttccggggacggggtgccgaccaacggtcggcacccacccgatcagctgtagcgctgcttcagcatcgcccacgccgagcgcagcgccagcgcttcgccaccggccggacggcccgggcgctcgccgtcgttccaggcatacacatccaggtgcgcccagcgctggccgtcttccaggaagcgctccaggtacagcgcggcggtcaccgagccggccatgcgcgaaccggcgttggccaggtcggcgatgccgctgcccaggtagcgcaggtaggggcgccacagcggcatgcgccagaccgggtcgcgggtcgcgtcaccggcctgcagccactgctgggccaccgtgtcgtcgttgctgaacagtgccggcaggtccgggcccagtgcgatgcgcgcggcaccggtgagggtggcgaaatccagcaccaggtccggcttctgctcaccggcgaaggtcagcgcatcgcacaggatcacgcggccttcggcatcggtgttgtcgatctccacgctcaggcccttgcgggtggcgatcacttcgcccgggcggaaggcatccggaccgatcgcgttttccaccgccggcaccagcagggtcagccgcaccggcagcccgcgcgccatcaccaggccggccagggccagtgcgtgcgcggcgccgcccatgtccttcttcatgttgcgcatgccgtcggctggcttgatgtccagcccgccggtatcgaagcacacgcccttgcccaccagcaccaatgccggatcggtgtccttgccccagcgcagcacgaccaggcgcggcgcacgatgcgaagcgcggcccacggcgtggatggccgggaaattctgcttcagcagttcgtcgccggtaatcgcctcgacctgcgcaccatgtgcatcggccagcgcgcgcgcggcgtcttccagctgctgcgggcccatgtcttcggtcggggtgttgacccagtcgcgcacgcgcaggctggcggcgatcaggtcggccacttcgccggtcggcgaggccaccagctgcgccggtgcgcgattgcgcttgcgatagcggtcaaagcggtagctgcccaggccccagcccagctgcagcagcgcccgttcggcggccggcagttcattggccagctgccacacgctgccttccggcagcgcgtgcggcgcatgcgcatagctgtaggcatcggcacgatcacccacgcccatcacggcaccggccaggccatcggcgcccggcagcagtgccacgctgtgggcgccggcgttgaagccctgcgatgacagccacgcctgcgtggcagccggctggctgtccttccaggcggcgaactgctcgcggtccagcacgtacaacggcagcgccgcagcggtgtcggcggtgaaaccagtgatctcgctcatgcgtcaggtactccggggtgcggcggcgtcgaggttggcatccaaccagtcggccaggccggtaagggtgtcgaactgcaggtccggctgcagctgcggatgggtccaggtggctgcgtcgcggttgatccagcagccgcgcaggccggcggcaatcgccccggccacgtccatgtcggcatggtcgccgacgtgcagcacctgtgccggtgccacacccaggcgggtgcacgcggcatggaagatgctggcttcgggcttggccgcgccgtgttcgcgcgaacccagctggaaggcgaaatgatgggccaggccgatccgctccaggtcggcgttgccgttgctcagcgccgccaccggtacccgtgcggcaatgcgcgccagcgcgtcgatcgcatcgggatagcactccacctggttgcgcgcggcgtagaacacttcatacgcaggctccagcagatcgaggctggcaccgctggtgtgcagtgcttcgtgcagggtcagccggcgcagcgcactcaggtcgtggtggaggtacggatgggcgtggtacagccgctcgcgcagttcgcgcatcgcctccaccggatacatcgcggcggtagcggggctgtgttcgcacatccaggcgtgcaggacctgttcgatgcgggcgccgatcggagcgaacggccacagcgtgtcgtcaaggtcgagggtgatggcttggacggggaaattcacctcgccattctacccctgcccgcgcgggctttcatgcgacgcggcgggcgggtgggcactgtggctgggccgggtcagcgcaggttgtacgagcaggcgatggtggtctggccgtcgaactgctgcacgtccaggttgtgccgcccaacttccttcgtgtaggtgcctgctaccgggtcggacatcttcgccagtgccgcgacctgttccacactggccgagctgaagtacgcggtgaaactgtcgatgccatcctcgccgctgtcgccgtcataggactgcagccggttcacgggctggcccagcaccatcaagggcgtggtcagccggaactcgccgctggattcgccgtcctgcgcccttgccggggccggtgccagcatccgggccatggcgtcgaactgcatgggcgtgaggtgccgcttgcaggtaaccgcctcagcaagctgggtgcgcgcctgatcggcagtcggcggcgtcgcggcgaacgcgggagcggcaatgcaggccaaggcaaggcaacgcgtggcgagagagttcatacgagcggatccatccgggtagggcgccatagtctgccacttcgtccctgtttctggttccgccacctgcgtccatccgttgttgatgccgtcactccagcaggcgtgcccagccctgcatgccatccaggcgtgccagcaccagcttgatgcacaccagcagcggcactgccagcagcagcccgatcatgccccaggcccagccgaacaccatcagcgccaggatcagcaccagcggcgacagcttcatccgacggcccagcacgatcggggtcaccatctgcccttccagggtgtgcaggcccaggtaggcggcggccggcagcagggcctgcagcgggtcgcggaactcgacgaagcccatcaacagcatcaatgccacgccgatcagcgggcccacgtacggggcgaagttcagtagtgcagccaccgtgccccacagcagtgcttcctgcaggccgatgccgagcagcatcagcacgccggcgaacaccagcccgaccagggtgttgatgacgctgatggtcagcacgtaacgcgagacctcccgttcgatcgaacgcaggatgtcggtggtgaaccgctgctgctggcggttcgggaacagggcgatcgctgcgcgctgcaggctctgcccgtagatcatgaagaacagggtcagcagcaccaccgccagcaccgacgcggccaggcgcggtgcacgggtcagcatgcggtatggatcgtccagctgggtgcggatcacctgcaccttgtggttgctgtcaccgccggccacgcgggcgaagttttccgccgcctggttggcctgctgcaccggcttggtcaggtcctgcacctgccgggccaccttgcgcagctgctgtggtgcttcctgcgcccattccatcgccggaccgatcaactgcaccgccagcgaaccggtcacgcccagcccggcgccgaggatcagcagagcgcccagcgcgcgcggaatccacagcttctgcagcaggcgcaggatcgggttgccgaccagtgcgaagaacatcgccagcagcaccggcaggatgatgtcctgcgcggcccacagcgtgtagcccaccgccagggtggccaggaccaccagcgacatcggcccgcgtggacgcgacgggggcggcagcggcgcctccgcaccctgcggatcggctggtgacggggacaggagggactcgctcatcgacgcaccaaccgggaaggggagcgcattatccgccggccgcgatcggcgcggcggagtgcgtggatcaacgttcggacagctcggtggcggcttcggccgggcgcggttcgcgcggttccggttcgggttccgggcggggggcaggtgccggccgtgcgttggcggcggaggccgccgcctgtgcctgctcgctggcatcgtcggcttcttcggccgcgtcgtcggcggtcgctgcagcctgtgccgccatcgccgtggcgaacgccgcctgggcactggcgaacaggttcgagaccgaaccgaccatctgcagccagcgcgcaccgttgaccttgccgggcacttccagcttgccggcgatgaagccaccggccaggccgaccaccacgatgcgcaacggcgaccagccctttcgccagacgtcgctgagcgtggaccagtggtcctgggtctcgcccaggcgcacggtcaccacctgttcgcagcgtttcacccgccgctgcagcgcgccgaacttcatggcttgccctcgggcagctgcacgccggcatcggggtcgtcttcgctgggctcgtcgaacaggcccaggcgtgacagctggcgccgggtggcatgcatgccggtgtgatggaagaagtaggacacccgccagatcgcgtagccggtgacggccaggctcagcagcgaggtgatcagcagcgcctgcagccagctaaggccccagctctgcagcagggcgatgagggtggccgccatcagcagccaggccgaggcaccaaatacgatcgccacgccggcccaggccagcgcacggccgaaggcgctgcgggccagggcgaagtcggccgaggccagccggcgcagcgagcgcacggtgtgcttggccgaatcggcggcggcacgaccggccgcgccgacctggcggatgctctcatccagcggcggggtggccgccggatcaggggcttgcgcgttgtcttcgctcacgccgcggcttacttgtcgctgctgccgcgggccagcttggcgatgatccagccggcagcgaaggcgacgccgaacgaagccagcggacgctcacggatcaactcggcggcgctgtcgatcaggtccttgcccttgtccatcaacgcgtcaacctgttccttggcagcggcaccaccgaattcggcggcggccaggccagacagtgcgctgtcggacagttcggccttgacgttggccttgccgatgcgcagctcgtcggtcgcggcaccggttgcgcccttgatcgcaccgccggcggccgtggcggcctgcttcaggtgggaaccggcttcacccaggtgttccttcaggttctcggtattggtggggctcatcgaatcactcctgttgcgatgggggaacgggtgtcggcggtgccgacctggactgacagcaatagcattgccggggtatagggggtgttacggcagggcgatcagcgcatcacgagctggccctgctgctggccattgttgcgcagcacgcgcaccaccagggtcggcgggcgctgctggaagttggcgcgccagctggccaggtcggcgaattcacccacggtggcgtcggtgatgatgtcgccctgctgcaggccgttgctggccgcgcggctgccacgcttgacctcgctgaccagcacaccgccgacacccgactgtcgcagcgactcgggcaggtcgacgaaggtggcaccggtcaaccgcgggtccaggctctcgccggtgaccgcacgcgcctgttccttcagcgtggccttgatctgcacgggcttgccttcgcggcgtacgtccagcgtcatcgggctgccgaccgcagccaggccttccacgttgtgcagggcttcggcgctgtccacgcgttggccgttggccgagaccaccacgtcgcccggcttcaacccggccgcggcggccgccgaaccggccagcacgcgggtgatcagcgcaccgcgcgtttcgcccaggcccagcccctgcgcgatctgcgcggtcaggttctggctctccacgcccagcgtgccgcgtaccaccacgccgtgcttgaccagctggtcgaccacgctgcgcgccaggttggacggaatcgccaggcccaggccgatgttgccggccatgctgccctgcgggttgaagctggcggtattgatgccgaccagctggccctgcaggtcgaccagggcgccaccggaattgcccgggttgatcgacgcatcggtctggatgaagttctggtagcccaggccacggatgccgctgcggcccaccgccgagacgatgcccgaggtgaccgtctggctgaagccgaacgggttgccgatggccaccacgaagtcaccgacccgcagctggtcgctgttgccgagcttgatgtcggtcaggttctgcgccgggatgcggatcagcgcgatgtcggtatcgcggtccgaaccgaggaactcggccttcaccgtgcgcccgtcggccagtgtcacctgcacgtcatcggcgttgtcgatgacatggtggttggtcagcaccaggccttccttggcgtcgatgatcacgcccgagcccagcgattcgttgatgcgctcctgcgggatatccgggaacaggcggcggaagaacgggtcgttgaagaacgggttgcgcacgcgcaccacctgcttggtgttgacgctgaccacggccggcatcgccttttccagcatcggcgccagcgaaggcaccgcctgtccggccaccgcggccggcaacgcggcggtggtcggcagcaccgctggcagcggtgctgcatcggcacggttgtccaggtgggcattgatgccggtggcaacgaagccaccgaaggcggcggcgattgcgagcgtaagcagggtgggaagcggtcgcatggttgtcggttcgctggcgtgggtgggggcggttcggccctacggtaaaacaagctgaatgagtgtgtcgcgatctggataaatgcgccatgaaaaccgcaggccgcgaaaggcgagtgaggaggctgacagcatggctgtggcgacaccgcacaggcgacgcctgcaccaccgaagacgatcgccgggggcgccgacacagaccgatacctgcgcagttccgcgcaaccgggtgccgcaatgcgccacagcacgcatcggatgccgcgtccgtgcagcggcacgcaacggccatcttcgaccacgcgcttgctgtggcgtagtccttaaaaaaaggggtttcctgtgaacccgccgcttctgcggcagtggtgggctacaccatggccgtcgcatcagatgcgattgcgggcgcgtgccccgttccacgatcgtcaatgtcggtatagcatcgccccgttttgatacttaaggcccccaggagggcaacatgagcaacggtaatggtgtgtcggtcgtgaccgacgccgtcgagaacgtcaaagaagccgccaccaacgttggcgagaccatcgcccacgccgccgaagacgccgtgaagtcggtcaagaagaccgtcaagcgcgccaccaaggcggccggtacccgcgttgccaaggccaagaaggccgtggccaaggtcgagaagaccgttgccaagaaggccgacaaggccgccaagtcggtcggcaagaccgttgccaatgccaagaagaagctggaagcggccaagaagaacgccaaggccgaagccgctgccctgaagaaggaagtggccaagaagaaggccgctgcaggcaaggctgtgaccaagaaggccgctgccgccaagaaggccaccaaggctgccggcaagaaggtcgccaccgtgaagaaggccgccaccaagaaggccgccgtcgcgaagaagaccgttgccaagaagaccgtcgccgccaagaaggtcgccggcaagaaggccgtggctgcgaagaaggttgtcggcaagaaggttgccgtcaccaagaaggtcgccaccaagaagaccgcggccgccaagaaggttgtcggcaagaaggctgccgtcgccaagaaggctgttggcaagaaggccgccgtcgccaagaaggctgtcggcaagaagaccgccgtcgccaagaaggcggtgggcaggaaggttgccgccacccgcaagacggtcgccaagaaggctgcgccgctgaagaaggtcgccgccaagaaggctccggccaagaaggccgtgcgcaaggtcgccaagcgcaagtaatcgcgccgtgaccgaaggccctgccacccaccgggtggtagggcctttcgcgtttctggggcgctacctggggcaagatgcaggttcttcccgccggagccccgaccatgcgcggtatcgacttcagttcctggcagggcgtgctgtccacgttggccggcctggtcctgatcaccctgctcggcgtcggcatccgcctgctggtgatgcagaccctgcagcagcgccgcgagcgcgagaaccggcagatcaacgaacggctgcgcacgctgatggccgcctacaagaccctgggcggttcgttcaccggcgagctgggcgtggatcccagccatcgtcgcgacctgcgccagcgcgaagatgccgacggcatcgccgagccgcgctcggaccgtgcgcggcgcatccgcgatgcggtcgaggccgcgctgtcggacatcctgctgctgggcaccgacgaacaggtgcggctggccacgcgtgccgccaacgaactggcacaggggcggccggtgcatacccacgaactggtggtctcgctgcgcgacttcgtgcgcgaagcgctggatctggccccgattccggccgatctgcagattccaccgcaggggccgacccggcccgttgccagtggtggcggcaagggccgtaacgacggcgatgccaagggcggccgtgcaggcggtggcggtggtggtggaatgggcgccggcatgggcggcatgggcctcggtgccggcgccgcactgggcgccggccatgctgctgccagcgatgaaacggacgcgcgctgagcacgtccgccgggttcagcgcgtcagctcgtagagcggcacgaagccgccgtagatcatccgcgcgccgtcgaacggcatcggattcttcgttggatcaaaccgcgggtcctccatcatcttcttcatgccggcgtcgcgggtcggcttgtccggccattcgatccaggaaaacaccaccgtctcatccggcgtggctttcaccgcgccgaagaagtcggtggtcttgccgtgcggcacgtcatcgccccagcactcgaccacgcgcagcgcgccgtactcgatgaaaacgggatcccctgtgcgtgcatgggcgaggaacttctccttgttggcggtgggcaccgccaggacgaaaccgtcgatgtagctcattgcctgcctccggatggaccgtgccacatgcacggccttcaggtacacgacgaaccagcgcgtagggaatcgacatcccgcgtgcgcctgttcagcccgggccacccgggagcggggccagcaccgtatccggtggctgctggccggccaggtggcgcacgaagtagtcccacatgcggtgcgtgtaggtggcgtcgttgcggaacagttcgtggtcctgccgggccaggtacagcaggtcgtaactacgctgggccttgttcagggccgcggccagctgcagggtcagcgccggtggcgcgttctcgtccagttcgccatagaccagcagcagatgcccgcgcaggttgccggccagtgccgcattgtcgagcccggcaaagggggccggcacgccatcggccatggctgtagctggcaccacgccaccgaacagccggtccatgccgtgcagggcgccgccgtacatgccccggaaattgtggctgccggccgaggccacagccaccttgtagaacgccgggtggcgcagcagtgcacgcgccgcgctgtaaccaccgaacgaatgcctgtagatgccgacccgctgcaggtcgatgccccggtagcgttcgcccagctggcgcagcgcggccacatggtcatcgagctgcacatcggcgccgtgcaggaagctgctgtcatggaatgccttgtcgcggccgccggtgccgcgggcatcgatgctgaccaccacgaagccgagctcggccaggctggcgcgcgataccgggttctgcgccgaaaccgcttcggcataggtcaccggcgcattgctgatgaaggcaccgccgtacatcgcgtcgatcaccgggaagctgccgtcatcgcgatagtcgcggggcaggtagacggtggcgaagatcggcgtgcgcccgtcggcggccagcagccgttcgcgccgcggcggccgccagccagcagcgatgatcgcctgcgcatccgcagcctccagtaccatcacttcgctgccatcgtcgctggcgcgcagcaccgtgcgcggcggctgcgcgaggctggacacggtatccaccagatagctgccgccgggcgacagcgcctgcggcgcgcgtccgccgaacagcatgccggtgcccgcatcggccaggtggtcgctgccatcggcggccaggcgctgcaccggcccaccgtgcagtgctacccggtacaggccacgtacgtagggatcgccgccctcgacaccaccagcactgaagtatgcccaagcgcctgcgctgtccaccccgagcaggtcacgcaccgcccaccggccgcgggtgagctggcgcatcaccttgccgtcggacaggcgcacccggtacagatggccccagccatcacgctgcgagaaccacacggcggtgtcctggccgggcaggatcgcaaccgaggcacggttgtaggaatacaggctgagctgcaggcgcgcgtcgccggcttcttccagcacggtgcgcagcgcaccgctgccggcatcgatctccaccaggcgcagtcgtcgcggcgcgccgaagtgcgcgatcgcggcatacagccggtggccgtcccagcccagcaggccggcctcgctgagggtgttccagccctcgggcagggtgatgtcctgctgccggccgctgcgcacatcgacgatgtacaggctgtcacgcacctgctgtgcatcgcccagcaatcccagtttcaccgtgtgcacgcggggccgcgcgccgccggccggggtgctttccagataggggtagtcctgcagcgcacgttcgtcgtagcggacgccggcaacatagcgtccatcgggcgaccagccgacggcgaacggccgcgccggcatccggccctggctgcgtggaataccgcgcagggtgaaatcgggcaatacaccatagccatggccggcgacaccgccggtggtcagcgcccgcggtgcctgtcggcgttgctgcagccatagattgtggtcgcgcacctgcagccaggcctcgccgtcgggtgcgggcagtgcatcggcagcaggcatggcgccctgcgtccgcaggcactgccaacgtggccactggcagtcgatgccggcttcaccgctgaagcgcaggcgcaggccatcggccagcacctgcacattgaccaaccgcaaccgttgcccgttcacccccagggcccccgcagcgctgtccagcgcagcgcgatcgaacaggatctgccgggaggcctgcgccggatcgaccagcacgccctcgcgccggccctggccgtcttcgcgttcgtaccagaagcggccatcggccagccagttcggcaggagcgaggcattgcgcagcgcaccgcgcaggtggctgtcgtgcacgcgctcggcgcgctggtaatcggagggctgcaacggccgagccgatgctgtggaaagcacgccgatgaaggcgaggacggcggcgcagaaccggaaccgcagcggggcaggtacgtgcaaggcaacctcctgttgcaagggtcagcggaattcgaatgcacgcgcgccgcgcgcgtatgccagacgcagcctgaatcaagccaaaaaattcagcaatgcgaagaccgctgttttcagggagcgttgtggcgaataacggagaatttacattcccgatgcgatggcgccctggcgctgctgcacaccataagaaagtaaaggtgtacccccatgaagaattcgctgattgctctggccctggccgctgccctgccgttcaccgcttcggctgctgagaacctgtcctacaactacgccgaagccgactacgccaagaccgacgttgaaggcatcaaggccgacggctggggcgtgaagggttcctacggcttcctgccgaacttccacgccttcggcgaatacagccgccaggaaatcgaccacaccaacctgaaggttgaccagtggaaggtcggtgccggctacaacgttgaaatcgctccgagcaccgacttcgttgcccgcgttgcctaccagaagttcgaccgcaagcacggtctggacttcaacggctacagcgctgaagccggtatccgcactgccttcggcgcccacgccgaggtctacggcatggtcggttacgaagactacgccaagaagcacggcgtcaatccggatggccagtggtacggccgcctgggtggtcaggtcaagctgaaccagaactggggcctgaacggcgagctgaagatgaaccgccacggcgacaaggaatacaccgtcggcccgcgcttcagctggtaattgctgcctcggcgcgattgcgcgctggagacgccccaggcccggcatttgccgggcctgttgcgtttgcgccgtggcaaaccggaatgctgtctgactggcggaatgcgcgggccagccattgcaaggaattggattccgccgctgcgggcaccgacctacgttggatgtcccatgttgcctggacatgccgcaatgccgctgaccctcccgcctctgctgcctgatcggccacgacgcctggcgctgctggacccgcacccggtactgcggttgggcgtggaagtgctgctgcgccagcacgcgggtgtgcaggtacgggtgagcctgtccagcgaggcgcacctgctgcacctgctggagcgcagcccgacgtgtgtcgacctgctgctgatcgatgcgttgcccatgggcgacctgggcgatgggttggccctgttgcacgtgctgtcgcagcgctggccggcactgccggtgctggtgctctcggcacactgcaatgccagcacggtggccaccgcgatgcgtgccggtgcgcgcggcttcctgtccaagtcgacgccaccggacgtgttgctgcgtgccattgatgtggtcgcccggggagggcgcttcgtgccaccggagctgcgcgcggaactgaacctgccgggcacgcgtgcacgcagaatgccggccccggcactggtgccgttgagccagcgcgaacgggaagtgctcgggctggtgctgaaaggggtcagcaccagcgaaatggccctgcgatcggggcgttcagccagcacgatcagctcgcagaaaacctcggcctaccgcaagctcggcatccgcggggacggtgacctgttccgcttccgccacctgctggaatgcggatgagcggcgttactcgccctggtactgcttctcttccaccagtgcagaaccggccacgcggttgatctcgttcttcacctgcacgcgctcgccattggtgccatagacaccgcgtgccagctggatgaatgcatcatcgaacacctgggccgcttccttgtcgcgcagctggtcctggatgtcccacatacgctcgttgatcgccttcaactgctgctgcagcgcggccagggccggctgtgcctgcagctgctgctgcaacaggggcagcaggccgtccagctcggtgcgcacgttggccagcttggcggcatcgtcgatgcgctcggccttgatctggagaatggtgatcttgtcgatcagctcgccgatcgataccggggtcaggatggcgtccacgcggttggttcctggaaacagggcgccatgataccgcgccgctggcgcatggccccgatccacgggatttacgccgaatttgcgccgcgggccgggccgcaccctcgatccgttacggccacgcgctggacactgccgtcccggcggcgtgaccgccttcgacgaggaacacagtgcagtgaacagcaaggggacgatggcggcggtggtggccgccctggcagggctgcttggcatgggcagcgcgcaggcacaggtgcaggtcagtggcagtgcggccttgaccagtgactacgtgtggcgcggcagctcgcagagcgatggtgacccggcggtgcaagccggcgcgaagatctcgatcccatcgggctggtacgccagcgtgtgggggtccaacgtctggttcaagccggacaatggcgcgcgcagcgagttcgacctggtggcgggctggtccggcgcgctggcaccggactggacgctggatgcgaacctgacccgctatgtgtatccgggtaccggtcgtgcgctggactggaccgaactcaacaccaccgtgacctggaagcagcgcgcctggctgcaggtcgcgcattccaacgatgcgttggccggtggccatcgcggaacctatgcccagctgggcgtgcgtgtgccgctgcacgaacgcgtccgcctggaagcagcggtgggccagtactggctggccaccgcgcagggcccggattacctgcatggccagctcagtgccattgccacgctgactccggcatgggagctgcgcgccaccgtgcatgacaccgacagcgcggccaagcgactgttcccgggcaatgccggtggacgctgggagctggcgctgcagggcagcttctagttcgacgatgccgcctggcgcgcgcgcagcgcgccgggcagccacagcagcagggccagcacggccacggcggcaccggccacgcagacgccggtccaaccgtagcgctggtagacctgcgccgacagcagcgaacccagcgagccgccgatgaagtagccggtcatgtagccggcattgaggcggttgcgcgccgcgggctgcagcgcatagatcaggttctggttgctgacgtgcagcagctgtgcggccaggtccagcaccaccacgccgatcagcagcgccagcagcgagtgggccgacagccccagtggcagccacgacagcagcaacagcaccagcgcgatggcagtggcgcgtccggtctggccgcggtcggacatgcgcccggccaggccggccgccagcgtgccggctgcaccgaccagcccgaacaggccgatggtggcatcgctgtaggcgtaaggtggctgcgccagcaggaacgcgagcggggtccagaaaatcgcgaacatggcaaagctgcaggcacccagcagggtgcgctggcgcagcaccggctcctgcacgaacagcacgccgatcgagcgcagcaaggcgaaatagcccaggccggcgctgtggtggaatcgtggcaggccgcgctgcaatgccagtgcggtcagcaccagggtgccggcagcgatggcatacaccaggcgccagtcacccaggctggacagcaggccggccacggtacgcgccagcaggatgcccagcagcaggccactcatcagcgtgccgaccacgcggccacgatgttccggcgcggccagcgtggccgcgaacggcaccagcacctgtgccaccaccgaaaacagtccggtgatcgcggtcccgaccagcagccaggccagcgacggcgcgcaggcactgatcaccaggccaccggccgacagcaggctcatcaccacgatcaagcggcggcgctcgaacaggtcacccagtggcaccagcaggatcagtccggcggcatagctcagctgtgctgcggtaaccaccatgccgacctggccgaacggcacgccgaaggcatctgcgatggtgtgcagcagcggttgcgcatagtagttgctggccacggccacgccggtggcgaccgacatcagcagcacctgccagcggtgcagagggggaagggacgggctcacgcggtgttccaggaagcggggtgcacagtgtccgcctgctgcggtcatgatggaaatgaatcatcatcatccttgtcatctgaaaacaagatagctggatgaacctcaagcagctcgagtttgccgtcgccctggccgaggagggcaatttcacccgtgccgccgagcgctgccacgtggtgcagtccgcgctcagccaccagatcgcccacctggaacaggaactgggtgccacactgttcgagcgcctgccacgccaggtgcgggctaccgccgccggcgaggcgttgctggtgcacgcacgccaggtgctggccagcctgcgccacctgcgcgccgacgtggccgccgtcagtggcgaagtgcgtggcctgctggccatcgggcagatttcttcgctgaccgacatcgacgtcgtggcgatgctggcggccttccagcgggtgcacccacaggtggagttccagctgcgcgtggacaagagcgaagacctgatcgcacaggtgcagtcgcgcgcgctggatgtggcactggtcggcctggcgccgtcggcagcgctggatggcgtctgccaccaggtgctgcaggaggaggatctggtagcggtactggcgccgtcgcaccggctcgccgggcgcacgcggttgccattgaccgcactgcaggatgaagcgctggtcgacttcccgcgcggtaccggtgcgcgccggcagaccgacgatgccttcgccgccgctggcctgccgcacacggtgcgtttcgaggtcaacctgatggaactggtcgagcgcttcgtccgccacggattggcggtcggcatcgtgccggcgttgatcgccgaaggtttccagggcgtggttcagattccactgcagccgaccccgacccggcgcgtacacctggtctggcagcggctgccgacgccggccgcgcgcgccttcgtcgaggccgtgctcagccgcgcaggcgcaggctcaggcccttgaggaagttgcgcagcatctggtccaggcagcgccggtagttggtgtgcccgggctggcggaacaacgcaccgacttccgacttggacacgttgaagccggcgctggcgaagatctccatcaggtccacgtcgcgcagctggaaggccacgcgcagcttcttcagcaccaggttgttgtcgatgcgggtttccaccgcacgctgcggctggctctcgtcgcgaccgcgcaggtgcacgatcaggccatcgaggaagtgcgccagtgcgctgtcgttcatcgcctcgaaaccggcttcgtcctcgcggcgcagccaggccttcacctgctcggtatccacggcgaaggccgggtcggccatctggcacagggtgaccacgtgctggtcacccaggtccagggagtagcgcacgctgcgcaggacatcattgttgatcatggcgcaattgtaccggtcaccccgacacgtggggtcgccgccggggtcagatccctttgctccgcaaagggatctgaccccggatccggccgatccggcaacacgggtgctgccggacggtgccagaatggagatctggttttccccctggagttgcctgatgacccgcactgtcctgattaccggcgccacatccggcttcggcgccgccgccgtccaccgcttcgcccaggccggctggaaagtgatcgccaccggccgccgcggcgaacgcctgcaaccgctggtcgagcgctatggcaaggacgtggtgcacgccgccgccttcgacatccgcgatccggtggcgatggaggcggccctgctggcgctgccgccggccttcggcgagatcgacctgctggtcaacaacgccggtctggcgcagggcaccgcaccggcacagagcgccaggctgtcggactggaccacgatgatcgacaccaacatcaccgcgctggtgaccctgacccaccgcctgctgccgcagctggtggagcgcaagggtgcgatcatcaacatctcgtcggtggccggcgtctacccgtacccgggtggcaacgcctacggtggcaccaaggccttcgtcagccagttctcgctgggcctgcgttcggacctgcacggcaccggcgtgcgcgtgaccacgatcgagccgggcatggccgagaccgagttcaccgtggtccgcacccatggcgaccagaatgcgtcggacaagctgtacagcggtgccaatccgatgaccgccgaagacatcgccgaacagatcttctgggtggccacgctgccaccgcacctgaacatcaatcgcctggagctgatgccggtcagccagtccttcgccgggttccaggtcgcccgcgagggctgacgccgtgtgtggagtcgagccatgctcgactcggcagaaacaaaaaaagccgggcaatgcccggctttcttcatgcagtcccgcagaacgtcactgcgccttgatggccatcgcctgcaggccggtgccatccagcttctgcttcgcttcagacagttcgccggcgctgccgtacggccccatgcgcacgcgatacacggtcttgccgttgatctgcgccgactccacgcgtgccgccaggcccatcatggccagcttggccttggtggcttcggcgtcgccggacgcaccgaaggcacctgcctgcaggatgtagcgggcgttgtcggcgggcgccggtacggcagtggtcgccggcgcggtgggcgcggcttccgcgcgcggagcgggggcggcggccgtgctggtcgacgccggtgcggtgctggccggcggggttgccgcggccgggcgctcgctcagcggtgccggcagcggacggttgctcgcggtcaccggtgcggtgctggcgacgctggccgttgcggtcggtgccggcgtggccgtgctcgccggcggcaccggcttgccctccagcgcggcctgcgcgcgcgacgcttcggccttggcccggcgctggtcctcggcacgcgcgctggcggccagttcggcgtcggacatttccacttccttgcccggcagcagggtgtagaagtcgtactgcgtcgccgcgggcttctccggttcggccggcttcggcgtggccggctgcgcggctggctggctgccgacatcgctgtctgcatcagcaaccggggccggctgcgcgttcgggttcggctgcggaccggcgcgcaggaagccgtcgccttcgcccttgaacaggttcggcgccgccaggaacaccacggcggcgatcgccacaccggccaccagccacacccatccgggtgtgccctggctgctgctgttgcgtcgtgcctgggttttgccgcgtcgtgctgccatgtgtactgcgtctcctgatgcttacattttttccggggcgctcacgcccaggagttcaaggccgttggccagcacctggcgcgccgcgcaggccagggtcagcttggcgttgcgatcggcggcgtcttccaccagcaccggcgtcccgtgataccacgtgtggaaggcatgcgccaattcacgcaggtactgcgccaccaggtgcggctccagcgccacgccggccgcttccaccacttccggatagcgcgagatctcgttcatcaacagcagcgaggcatcgtcggccaggtggccaaggttggccaggccattgccctgctcgtacaccaggcccttttcctgcgcctggcgcagcaggctgcagacacgggcgtgcgcgtactgcacgtagaacaccggattgtcgttgctctgctggcgcgccaggtcgatgtcgaaggtcagctgcgaatcgggcttgcgcgcgatcaggaaccagcgggtcgcatcgcggccggcttcttcgatcaggtcgcgcagggtgaagtagctgccggcgcgcttggacagcttcacttcctcgccgccgcgcatgaccgtgaccatctggtgcagcacgtattccggccagccctgcgggatgcccacttccatcgcctgcaggccggcgcgcacgcgcgccagcgagccgtgatggtcggcgcccagttcggtgatcgcgcgctcgtagccgcgctgccacttggacaggtggtaggccacgtccggcacgaagtaggtgaaggtgccgtcggacttgcgcatcacgcggtccttgtcgtcaccgaagtcggtgctgcgcagccacagcgcgccgccttcctcataggtgtggccggacgcctgcagcttggccaccgcttcggcaaccttgccgtcggcgtacagcgagctttccaggaagtagatgtcgaagtcgacaccgaacgcggccaggtccaggttctgctcgttgcgcaggtaggccacggcgaagcggcggattgcctgcatgtcgtccgggtccttggcgccgaccacggtgctgccttccaggtcgacgctggcaccggccatgtaggcgcgggcgacatcggcgatgtactcaccgcggtagccgccttccggccagccgtcctgatcgggtgcgacgcccttgatccgcgcctgggtggacagcgccaggttctcgatctgcacgccagcgtcgttgtagtagaactcgcgcttggcgttccagccgttggcatcgagcacgcgggccacgcagtcgccgatcgccgctgcgcggccatggccgacatgcagcgggccggtcgggttggccgacacgtactccacgcccaccgtgcggccattgccggacaggttgcggccgtagtcgtgggcttccttgatgaccgaggcggtttcgcgctggtacgcggccggggccagatggaagttgatgaagccggggccggcgatctcgaccttgctgacgtcctcgctgcgcggcagcgcctcgaccagcgcctgtgccagtgcgcgcggattgctgcgcgcggccttggccagcagcatcgcggcgttggtggcgaagtcgccgtggtcacgggtcttcgggcgctcgaccacgaagtccggcggcagggagtcggcgggcagggtgccattggcgcgcaaggcttcgatgccttggctgatcagggcgcggaggagatttttcacgaggcctgctgtgagaatgagcggcggaatcgcccattttagcgcagatgcccgcgcccacgctgaccaggacatgcctgcggggcgcccgcccggccctgaccagggccgttcagccgaacaggcgcggctggggcggggacagcaggccccgttcagcaaatgaaacggggcggccctcgccgaccacgaagtggtcgagcaggcgcacgtccaccagtgccagcgcctgctgcagttcatcggtgatgcgggtgtcggcgccggagggctcggggtcgccggaagggtgattgtggctgaggatcaccgctgccgcattgtgcagcagggctcgacgcaccacctcgcggggatagaccggggcggcattgatggtgccctggaacagttcttcgcaggcgatcaggcggtggcggttgtccaggaacagcgccatgaagatctcgcgggcctggccgcgcaggcggtgctgcagatagcggccgaccgcagccgggttgttgccgacggcctcgccctgctgaagttcggccgccagatagcggtgggccagttccagcccggcggccagtgcacagcttcgagcagggcccagccccggcaaccgggccagctcgcgggccgggcggtccagcagcacacgcaggggaccgtgcgcctgcagcaggtcgcgcgcggtctgcaccgcatcgcgtccaccgaagccggagccgaggaacagtgccagcagttctgcgtcggacagcgtggcggggccgcgtgcgatcagcttctcgcggggacgttcctgttcgggccagtcgtggatgggcatgcctgcatcatcgccagtgggggcgatgcggcccatcagggcaggacgcatgcccgggtcggccgttgcctcagtcgcgtcgcgactgcaggtaggcgaacagctcctggttgttctgcagccccagcttgcgcttggcctcggccttctgccggctgatcgtcttggggctgcggccgcagtggacggcgatggcgttcactttcagcccggcggccaacaggtccagcacttcctgttcgcgggcggacagcgccgccggttcgcgcgcgaacatcaggtcgcgcgcctgcaggtggtggcgcagctgctgcgagacgaacacctgccctgccatggccgcgttcaaggcctgcggcaactcgccgaaatcggcgcacttgtcgaccaggccgctgacaccctcacgcagcaggccatcgagcaggccggggtggcgggcgccggtaagcaccaccacgggcatgcgcgggtggcgtgcgcgcagttcagcgatcagttccgggccatccgggccggtgcccggcatggagaggtcggtcagcaccgcgtcgcagccgtggtgctcgaccagctgcagcagctcggcgccgtcacgcgcgctgccgacgacctccatcaggtgggtctgcagcacgatgcggatgccgtgcaggacgacgggatggtcgtcggcgatgatgatgcgcgggtgcacgcggaatcctcgaaaagcgaagcggcacacctgcggcggccactgacgattctgcaaacgtggccggcctacaggtataggaaagttccgaatcgcagtgtcttgaaccccggaagcgctgtggtgcaagtcccatctgctgatagctgcccgctatgtgcgctgtgcaccgggacattaccgaccatcgggtaagctaatgccctcgtttgcacaggaattccaggtggctgactcccccaacgcttcccccgcgcccggccgcgcgctggaaggccagaaactgctgttgtgcgtcggaggcgggatcgcggcctacaaggccctggaactggtgcgacgcctgcgtgatgcgggcgcccaggtgcaggtggcgatgaccgccggcgcccagcagttcgtcacccccctcagtttccaggccctgtccgggcagccgacccgcaccacgctgtgggacagcgccgccgaacaggccatgggccacatcgagctggcccgctgggcggaccgcatcgtggtcgcgccgggaaccgccgatctgctggcccggctggcccagggccatgccgatgacctggtcagcaccctgtgcctggccagcaccgcaccgctgacgatctgcccggcgatgaaccatcgcatgtggctgcatccggccacccaggccaacatcgccctgctgcgccagcgtggtgcgcaggtgatcggcccggtcgatggcccgctggccgaaggtgaatccggtcccggccggctggccgaacccggcgacatcgtggccgcgctggccgccaatggcggcgccgctgcgacggttgccgcgccggaaacccgtgccctgcaggggctgcgcctgctgatcagtgccggcccgacctacgaagacatcgatccggtgcgttacgtcggcaaccgcagcagcggcaagatgggctttgccctggccgccgctgctgccgcgctgggcgcgcaggtggtgctggtcagcggtccggtacagctgccgacgccgccgggcgtgcagcgtatcgacgtgcgctcggccgcgcagatgcgcgatgccgtactgaagtcgctgcccgccgacatctatatcggtgccgccgcggtgtccgactacacgccgcgccaggtcgccgcgcagaagctgaagaagaccgccgacagccagtcgctggtgatcgaactggtgcgcacgccggacatcctcgccgaagtcgctgcacagacgcagtcgctgaagctggtggtcggcttcgccgccgagacccacgacgtggagaaatacgcgcgcggcaaactggtcgacaagcgcctggacctggtgatcgccaaccaggtcggcatcagtggcggcggtttcgagagcgacaacaatgccgccacggccttctggcaggacggcgaacaggtattcccggccacttccaagcgcgagctggccgaacaactgctggcgctgatcgcgcggagactccaggcatgacccaggcatccacttcccacccgctgcaggtcaagctgctcgatccgcgcttcggcgacagctggccgctgccggcctatgccaccgaggccagtgccggcatggacctgcgcgcggcgctggataccgcgctgaccctgcagccgggcgacaccgcgctggtgcccagcggcctggccatccatattgccgacccgaacctgtgcgcggtgatcctgccgcgttccgggctgggccatcggcatggcatcgtgctgggcaacggcaccggcctgatcgatgccgactaccaggggccgctgctgatcagcgtctggaaccgtggccgcgaggccttcaccatcgagccgggcgatcgcatcgcgcagctggtggtggttccgatcgcccgcgtcagcctgcaggtagtggatactttcaccgacagcgtgcggggcgcgggtggattcggccataccggggtgcgttgacaggggacatcgatgagcggcatcggggaaggacagcggggacggtcgttgggtcgcagtgcacctctactgggggtgctgttgatcctgttggccggctggttcggatggagcgcggtgcagcaatggcggcaggaggccaacgggcaggcgctggaagaggcgcgtgaccaggccgtgcagggcctgcagcaggctgctgcgggccagttgcagcagctgcagcagcagttgaagaacgatcgcgtgcagcaggcgctgcaggccggcgacgccgctgcggcggcgctggccgttcgcgagagcgggaccggggtcgagcaggtcgaggtgctggcggccgatctggccaacgcctatgccgatccggccaccttcgggtattcccgcctggcgctgctggaagcggcgctggccgaggccaggccaagcctgcgcgtggtccgcgacggcggcggcaaccgcctgggcctggccgcgccggtgcagctgggcagcctggggccggccgtcatctatgtccgccaaccgctgctgcggctgacgtcgccgctcgaccaggtcagcgcgccgtccgccggcttcctcggcctgcgccagggagcattcgatctggtcacccagggcgacccgagcctggccgaaagcgcggaagcgctggcgcgcccggttgcaggcacgccgttgcggctggtcgcgtcggtgccgaatgtcgaggccggtccgctcggcctgggcgcgctggccagcgccattgtggcgttgctgctggcgttcattgccgtgttgctggtggtggggcgcgaccggctgccgaagtcgctgccgttgccgcgccgcgccgccgcgtccgaggccgaccatggcccgaccctgagcgagagcctgcagcaggcgccgccaccggtggccgccgcgaccggcagtggcgatgccacgccaccgccgccaccgccggtgcctgccgaagagctggccgccggcatcttccgcgcctatgacatccgcggcatggtgggcagcgaactgacaccgaagaccgcggcgctgatcggccaggccatcggcaccgtggcactggagcagggcctgcgcgaggtggtgatcgggcgcgatggccgcctgtccggacccgagctgacggccgggctggccgagggcctgcgccgtgccggctgcgcggtgatcgacatcggcctggcgccgaccccgctcgtgtactacgccgccttccatctgcgtaccggcacctgcgtggcggtcaccggcagccacaacccgcccgagtacaacggcttcaaggtggtgatcggcggcgagacgctgtccggcgatgcgatcaccgacctctaccagcgcatcgtcgagggccgcctggtgcagtccgccgagccgggtgactaccagcagcgcgatgtcagtgccgactacatccagcgcatcgccgatgacgtgcagctggaccgtccgctgaaggtcgtggccgatgccggcaatggcgtggccggcgcactggccccgcagctgctggaagcaatcggcgccgacgtcattccgctgtactgcgatgtcgatggcaccttccccaaccatcatcccgacccgagcgagccggccaacctggaagacctggtgcagacggtcaagcgcttcggcgccgacctcggcgtagccttcgatggcgacggcgaccggttgggcgtggtcaccggcgaaggcaggatcatctatgccgaccgcctgctgatgctgttcgctgccgacgtgctgatgcgcaatccgggcgcgatggtgatctacgacgtcaagtgcaccggcaagctgtccgaccatgtgctgcgcaacggtggcagcccgctgatgtggaagaccgggcattcgctgatgaaggcgaagatgcgcgagaccgatgccgagctggccggtgagatgagcggccacttcttcttcaaggaacgctggttcggtttcgacgacggcctgtacgccgctgcgcgcctgctggagatcctggcccagcgcgaggaaaccccggacgaagtactgggcgaactgccggagatggtcgccacgccggagctgaaggtagcggtggccgacgggacgccgcatgcgttggtggcgatgctggtggcggcggcgcagtcgccggacaacccgtatgtggggggccgcctgtcgaccatcgatggcctgcgcgtggacttcgccgatggctggggcctggtgcgcgcctccaacaccacgccggtgctggtgctgcggttcgaaggcaacgacgaggccgcactcgagcgcatcaaggccttgttccgcagccagctgcagccggtgctgggcgacaccccgctggggttctgaggtggggccgggcggcgcccggcacccgccgaatcaacgtcaacgtcaaaggccggctatccgtgggatgcggggtgggtccggttacgggggacgctgcaagtccccctccggggcccggcccagccggtggcggctgggcgttcgggcgcttgcgaagcagtgcttcgcaagcaaagcgccctcacccatgtaagctcggtcgccgcttgctcgtgtgcgcagtcgtgcgcacatggcaagaccggggttgggcgtcctgcccaacccgcccgaggcatacctcgggcccatgcggctcacgcccccgcaaccggacccaccccgccttcgacagatttccgcgatctgtccgaaccgcatgaactgctcctggtaggtgtcgaccttggtcgacacagcagagatccacgccatgcgtggatgctcttccgaatttgctttggtgggtgccgaccgttgttcggcacaccctcaccccttgaatcgcaagcccacgcccggttcggtgaacaggtagcgtgaatccagcgccgaatcgcccagcttgtgccgcagcttgccgaccaggatgcgcaggtaatgggtatcgtgctggtgggtcggcccccagatctcctgcaggatctgcggctgtgtcaccacccgcccggcattgcgcagcagcagcgacagcaacgcgtattccttgcgggtcaacgccaccggttcaccctgcagggcgacttcgcggcgcaccaggtccacgcgcaggtggccgtcgtcgaacaccggtggcgtgccatcactgggtacgctgcgcgtgcgcagcagcgcccgcacccgtgccatcagttcctgcgtgccgaacggcttggtcacgtagtcgttggcgccggtatccagtgcgcgcaccttctcggcttcgccggcgcgcacggtcagcatgatcaccggcacctggctccactgccgcagctgttcaagtacctcgtggccttccatgtccggcaggccgatatccaggatcaccaggtccatgtcctcgctggcggccagctgcaggccttcctggccggtggcggcctgtcgcacctggtagccctgcgcgcgcaggctgatgtccaggaaccggcggatctgggtttcatcatcgatcaccagcacgcgcgcggccggcacgctggcatcaatcggggtcgggctcatcgtgggaggctggcttgagcaggggcagggtgatgcggatcagggtaccgcgaccgtcgcgtccgggcagcgcctgcacgctgccgccatgtgcgccgatcatgccctggcagatggtcaggcccaggccggtgccgtggcggccgcggtcgccgcgctcgacgctgtagaacatgtcgaagatgcgcgcgcgctcgtcgtcgggaatgccggggccggcatcgatcacgtcgatgcgcagctggccgtccagttcgcgcgcctgcacctgcacggcggcgtcgggcggcgagaacttggccgcgttctccatcacgttgaacacggcctgttcgaccagcgccgggtgtacccagatcggcgccagcgtggacggaatgtccagctccagccgcaccttgggctggtagcgctgcaggcgccgtgcggccgagccgatcagttcgtccacgccgatccagtcacggttgatcttcagaccttcgtggccaaggcgggtcatgtccagcaggttctggatgtagcggtccagccgctcgccttcgaccaggatggtgtccagcagggcacggcgatcggccgtgtccatcgccgcgccgtaactggccaggctgtcggccgaaccgatcatcgccgccagtggagagcgcaggtcgtgcgacaccgaagagagcagggccgagcgcaaccgctcggtctcgttgctgacatgcgcctgttccagttcggccaccagccgggtacgcagtgcggcctgcgcgatgtcatcgaccatcgcctcggcaagctgccgctgttcgggcagcaggcgtgcctgtgcgccgggcaggtacaggccggccacgccgatcgcgcgatcttcgccatccagcaatggcaggaaccaccactgcgcaccggccagggtgtcggtgaagcggccgctgggctggccgtggcgcagcgcccagtcggcggcagccaggtcggtatcgccgggttggctgcggccaccggcggcagtgtccgcgccgatccgcagccacgccggcacatccatcgcctgctccaaggcatgccgacctgcctgtgccacctcgccgttgccagcggcgctggccagctgacggcccagctgctggcgtgcacgtgcatggcgattggccgcacgcagcgcaatgacctgcatgcgcaggcgcgaggccagccgtccggccaccaaggcggcggccaggaacaggaacacggtgatcacgccctggcgcgcaccgatggcgaaggtgaagcggggcgcgatgaacaggaagttgtaggccaggaagcacaggatcgccgccatcaccgccacgctggcacgcgtgcgcgccgccaccagcaccactgccacgatgaacaccatcgacaggtcggccatgccgacccagcgttcggccagccaagccaccgcacaggccagcgcggtggcgatcagtgcctgtaccggctcgtagctgatgccgcgcatcggtggcagcagaccctcgcggcgcgagcgcgcccgggcctgcggcgtgctgatgatggtgatctcgtagtgcgccccgcgctggatcagctgctgggtcagggttcggttgaacatccgcgccagcgggcgctcacgggtgcgccccagcaccagggtcgatacgccgttgtgcgctgcatggtccagcagggcatcggcgatgctcgatccgtgcagcagttcggcgtcgccacccaggcgccgtgccagggcgaaggccgcatcgatctcgcgccgcgtggcctcgtcctggcgccggccctgcacggtcaccaccgtccacggtgcgtcgcggcgctcggcgatgcggcgcgccacccgcaccaggtactcgctctggccgccgccatcgatggccaccagcacgccgcgccgcagcggcaggttgccttcgccccgtgcggcgcgggtttcacgcaggctgctgtcgacgcggtcggcggcttcctgcatcgccagctcacgcagggcggtcaggttggccggcgagaagaacgcctgcagcgcctgcgcggcctgttcgggcacatagaccttgccctgctgcaggcgcgcgatcagttcgcgcggcggcagatcgaccagcacgatgtcgtgcaggcgatcgagcacgccatcgggcacggtctcgctgacccgcacgccggtgatgcgcatcaccacgtcgttgaggctttccagatgctggatgttgaccgtggtccagacgtcgatgccggcgtcgagcagctccatcacatcctgccagcgccgctcatggcggctgccgggcgcattgcgatgggccagttcgtccaccagcaccagcgctggatgccgtgccagcacggcatccaggtccatctcctgcagcgcgtggccgtgataggccacgtccttcaacggcagctgcggcagaccttccagcagggcctgggtttcggcgcggccatgggtttccaccagcccgaccaccaggtccacgccgcggcgcagctgctcctgggcacgggtcagcatggtgtaggtcttgcccacacccggcgcagcgccgaggaacacggtcagcttgccaccggcttcgcgttgcaggccttccaccagggcatcggcctggcgggtacgcgcatcagtcatgggggccactgtcatggccgccattgtgcgcgcagccgatgcaggccggcatcacggcgccttggccgcatggtccagcgcgaagttcagcgtcaccacgttcacccgcggctggccgaacacgccccactggcgcccttcagtatgtgcctgcaccaaggcctgcacgcgctccaccggcaggccgcgggcacgtgccacgcgtgccacctgcagctgcgccgccgccggcgacagctgcggatccagcccgccgccggactgggtgaccaggtcggccggcacctgcgccggggcgacaccttcgcgcgcggccaccgccgccgtgctggcggcaacacgctcggccagcgccgggttgctgcgcgccaggttggaaccggccgcggccatcgggtcgtagttggccgccgacggccgtgcctggaagtagccatcaccggtgaacggctgcgacagccaggccgagccgcgcacctggccgttgccatcgcgcagcaggctgccctcggcctgggtggggtaggccaggccggcgaaaccggtggcgatgccggcgtagactgcgccggccagcagcagggtagccaggcccaggccgatcgccgggcgccagccggcgccgtcctgcaggctggccacgcgggcttcggccttcggttcgcggggcagggtggtggaggtggaagcagaacggttcatgcgccgaataccaggacaaggaagaggtcgatcagcttgatcgccgcgaacggcaacagcacgccgccgaggccgtacaccagcatgttccggcgcagcagcgcggtggccgtggccggacggaagcgcacgccacgcagggcgagcgggatcagcgcgggaatcaccagcgcgttgaagatcagcgccgccagcaccgcgttgcgtgggctcgacagctgcatcacgttcagtgcggccatggccggaaccgcagcggcaaacagcgccggcaggatcgcgaagtacttggacacgtcgttggccagcgagaaggtggtcagcgcaccgcgggtgatcagctgctgcttgcccacttccacgaccgccagcagcttggccgggtctgaatcgaggtcgaccatgttgccggcctccttcgccgcctgcgtgccggagttcatcgccaggccgatgtcggcctgggccagcgcgggagcatcgttggtgccatcgcccaccatcgccaccaggcggccaccggcctgttcctggcggatgcgtgccagcttgtcttccggacgggcctcggcgatgtagtcatcaacgcccgcttcggcggcgatggcggcagcggtcagcgggttgtcgccggtgatcatcaccgtgcggatgcccatcgcccgcagctgtgcgaacttctcgcgcatgccgtgcttgaccacgtccgacagctcgatcacgcccagcacgtggcggccctcggccaccaccagcggggtggcgccattgcgcgcgacctgctcgacgcggccggccagttcagccggcacgctgccgccgagcgcctgcacgtgggtgcggatcgcatcggcagcgcccttgcggatctgccgcccgtgttccagatcgacgccggacatccgggtctgggcactgaaggccaggtagtcggcacggtccggctcggcggtggcgcagccctgttcgcgcgccaggcgcacgatcgacttgccttccggggtcgggtcggccagcgaggacagcagtgccgcctcgcgcagctggctggcgtcgatgccggccagcggatggaagtggctggcctggcggtcgccgtaggtgatggtgccggtcttgtccagcagcagcacgtcgacgtcgccggccacttccaccgccttgcccgacttggccagcacgttggcagccagcgcacggttcatgccggcgatgccgatggccggcagcaggccgccgatggtggtcgggatcaggcacaccagcagtgcgatcagcagcagtggatcgacctgcacgcccacggccgcgccgatcgccggcaacgtggccaccaccaccaggaaggtcagcgtcatcgccgccagcagcagggtcagcgcgatctcgttgggggtcttctggcgattggcaccttccaccagcgcgatcatgcggtccaggaagctgtggcccggctcggcggtcacccgcacgatgatctggtcggacagcaccttggtgccaccgatcacaccggaacggtcggtaccagcctcgcgcagcaccggtgccgattcgccggtcactgccgcttcgttgatggtggccaggccctgcacgatctcgccatcggccggcaccagctcaccggcactgacgatcacatggtcgcccgggcgcagctcggcggccggcacctgggcttcggctgcacccggctgcggcgccgccagccggcgcgccaccaggtcctggcgagcgcggcgcagcgaggcggcctggccacggccacgcgcttcggccactgcctcggcgaaattgccgaacagcacggtcaccagcaggatggcggttaccgccaggccgaagcccagcggtgcattgccggtcagggtgacgatcgcggcgacgatcgtgccggccatcaccaccgccatcaccgggctgcgcaccagatgcatcggcgccagcttgcgcactgcttcgaccagcgcacggcgcaggccggcgccatcaagcagggcagggcgcggtgcatgggtactacgggttgaacttgcttgggtactcatcagggtgtcctcagcgcagtcccaggctcaggtgatcggcgatcgggccgagtaccagcgccggcatgaactgcagcacggtcaggatgacgatcaccgagaccagggtcagggcgaaggtcggggtttcgatctgcaggctgccggcagactccggcgcctggcgcttggcggccagctgtgcggccaccaccagcggaatgatcagcagcgggaagcggcccagcagcagtaccagcgagcagctcaggttccaccacagcgtggcgtcacccagtccttcgaagcccgaaccgttgttggcgtaggccgagacatactcgtagaacacctggctgatgccatggaagccggggttggaggtgccggccaggccgggcacggccagggtgatcgcagtgaacaccagcagggtgatcggctgcagcagcaccagcagggccagcaggcgcacctggggcgtctccagcttgcggccgaacagttccggcgtgcgcccggtcatcaacccggccaggaacacacccagcagcagatagacgatgaactgctgcaggccacagccgatgccgccccagatcgcgctgaccagcatgttgaccatcgcgatgccaccgctcagcggcgccagcgaatcgtgcatgccgttcaccgagccattggagacctgggtagtcaccgccgcccacagcgccgtgccgtcggcgccgaagcgcacctccttgccttccatcagcagcggggtggcggcgctggcgctatgcccttcgctccacatcatcgcgccggtggaaagcagcgacatgcccagcatgcagctgaacaccagggcgccgaagcgacgccggccggtgaacgcgccgatcatgaagatcaccgccatcggcaccagcaggatgccgacgatttccagcgcgttcgacagcggggtcgggttctccagcgggaagctgctgttcgggccgtaccagccgccaccgttggcgccaagctgcttggccgcgaccatcgccgccaccgggcccagcggcagcttctgtccggtcatgccggcgctggcatcgatcggcgtggcctgcgggccaccggccatcgtcgacggcacaccctggctggtcagcagcagggtccacaccaggcacagcggcaacaggaaacgcacgcacaggcgcaccacgtccacgtagtagttgcctaccgccacctggcggtcatcgccggcaccggtggccgccgcagcctgcggcgcacgcgagaacaacgcgcgcagcgtcgccaccgccagcgccaggcccatcatcggcgtcaccacctgcaggccggtgatgccggtcatctgcgagaggtaggacagctgcgcctggcccgaatagtgctgctggttggtgttggtcaggaacgagatcatcgtgtgcagcgcggtgtcccagcgcatgttcgggatctggtccgggttcagtggcaaccaggcctgggtcatgaacaccgcctgggtcaacacagcgaccaccacgttgctcagcacgaaggccagcacgtagccgcgccaggacatcgcgcgcgagggatcgacgccgaacaccttgtacaacggcttttcgatccagttgaacagcacgtcgaccttcatcggcgtgccgcgcatcacgcgggccaggtacaggcccagcggccacgccagcagcaggctggcggcaagaatgacaagcatctcagtcatggccggctccgttagaacgattcgggccgcagcacgacatagagaagataggcggcggcgaccagcaccagcacgccacacaacaaagacagccagggggacatttcaatagcgacctggtggaacccctccacctcaggccgtcatcgtcgtcctgccgcccataaacgcactacgcgccggaccgggccgacgcgtaaagagtgcataaattccgtgggccaacccgtaaccacgcgccgcctgctgtagagccgagcccatgctcggctgccctttcccaaggtcacgcggagccgagcgtgggcccgccgctacaggcgaatcacggcgcctggctcgcctgcgccacgcccttcagctcgcgatagcgctgcagcgtgctgtcgatctcggccttcagcgcctgctgctgctgcaggaacccggcctgcaggcgttgctgcgactgcagttgtatatgccgctggcggatcgcctcggcctgcttgtcggccaccttgccaccggccagttcgcggtcaccggcggccgacagcagcgccaccagcgattcgcgcaggctggtgacgttgtactcggcggtcttcaggttgttgtccagcacttcctggcgttcggcgaacacccggcgcaggtcgtcctcgctgccataggtggacagcatcgcctgctcggtgcgctggcgggtctgctcggccatcaggtccagctgctgctgctgtgccacggtgctggctgcggcgcgctcctcgtcggtcaacgcgcgctggacctgcgcattgcgcaggccgctcttcgcgttgaactcctcgcgggcgtgattgaccgcatcggccggcagcgaatcactgcagatccgctccttgccctcgttccagcagtacagcttcttttccaccttgccgccgtcgcgcgactgcgccggcacggtgaacggcacggccagcagcaggccggcaaagagaacagcaggaactcgggacatgacctttcccctggtcggtcagcggatcgaacggacgccgtactgggcccggtaggcttccagcggctgccggtaaccgacaagttccgggttgccggaggcgaaatcaagcagatcggccagcgatgccacggcgatcaccggaatgccggcttcttcggccaccgactgtgccgccgagcgacggtcggcttccgaggcgatctcctggcggtccagtgccaccacgatgccggccggggtgccgccggcagcgcggatgatgcccagcgcttcgcggatcgcggtaccggcggtgatcacgtcatcgacgatcagcacgcgcttgccattcatgtcggcgccgatcagctggccgccttcaccatggtccttggcttccttgcggttgaacgacagcggcaggtcgcggccacgctgggccagctcgcaggccatcgcggtggccagcggaatgcccttgtaggccgggccgaacaccacgtcgtacttgatcccggtggcatcgatggcatcggcgtagcaggcgccgagctgcgacagcagcgaaccggagtcgaaacgaccggcgttgaagaaataggggctcagccggccggacttgagggtgaactggccgaagcgcagggcgtcggcagtcagggccagctgcaggaaacggtggcggtggtcgctcatcaaaactcgattcatcttcatttggagcacaaatcctaatccagctgggcgttttgcgctcgtccagcgccatgtgaaagccgtccaggcccggcctggcggactgcgcagccctgcaggcaaccggtatgcttgcccggtttcccgccgcaggtcccccgcatgcgcatcatcagtttcaacgccaatggcatccgttccgccgcgaccaagggcttcctcgactggttccgtgcccaggacgccgacgtcctgtgcatccaggaaaccaaggcccaggaagaccagctgaccgacccgatgttccgtccggacggccaccactgcttctatcgcgatgccatcaccaagaagggctacagcggcgtggcgatctacagcaagcgcgaaccggaccaggtcatcacctcgctgggttgggcgccgttcgacgacgaaggccgctacatcgaggcgcgctacggcaatctcagcgtggtttccttctatatcccatcgggcagctcgggcgacctgcgccagggcttcaagttcgaagtgatggaatggctgcggccgatcctcgaagcgtgggcgcgcagcggccgcgactacgtgctgtgcggtgactggaacatcgtgcgttcggcgctggacatcaagaactggaagtccaaccagaagaactccggctgcctgccggaggagcgcgactggctcaacgcgctgtgcgccgaccacggccaggccaccgatgtcgccggcggccgtgggtgggccgatgcctaccgcctgctcaaccccaccggagaggactacacctggtggagcaaccgcggcgccgcccgtgccaacaatgtcggttggcgcatcgactaccagttcatcaccccgggcctgcgtgaccggctgcgcagctgctcgatctaccgcgacgagcgcttctccgaccacgccccgttcaccgtggactacgacctgtgaccgaggccgccacgccggtcagctacaagggctgggccggcatcaagcgcgccttcggtaccccgtcggcgctgaccatggccatgctcggcttcggcagtggcctgccgttcctgctgatcgcctcgcagaccctgtccacgcgcctgcgcgacgtcgggctggacctgggcagcatcggcctgatcagcctggccagcttcttctacctgctcaagttcctgtgggcaccgctgctggaccgctacgccttcccgctgctggggcggctcggccgccgccgctcctggctgctggtgtcgcaggtgctggtgctggtcgggctggtcgcgctggccttcgtgcggcccgaacagggcgtgtggccgttggtgatgtgggtgctggtggcgtcgttcgccggcgccacccaggattcggctgtcgatgcctaccgcatcgagatcgcgccgcagaccgcccaggcggcgctggccgccacctatacgctgggctaccggatcggcctgatcctggccggtgccggcgcgctgtacctggcccagttcgaaggctggatcgtcgcctacctggcgatggccgcgctgatgctgctgccgatcgtcaccaccctgctgtgcgccgaaccgcagcgcccggccaccgccgtgcagcgccgcatcgatattgccgaagcgttcgtccagcccatctccagcttcttcagccgcaatggcgtggcactggcgctggtgctgctggccttcgtcggcctgttcaagttccccgaccaggtgatcggagtgatggccgggccgttctatctcgactcggggttcgacaaggccgacatcgccaccgtctccaagctgttcggtgtgtggatgggcatcggcggcgcgttccttggcggcatcgcggtggctgcgttcggcttccgccgcatgctgctggtggccgcgctgggcgtggcgctgtccaacctggccttcctgctgatggcgcacaatccgggcaagctgtgggcgttctacgccgcgctcagtgccgacaacctgttccagggctttgccggcaccgtgctggtggccttcatgtcgtcgctgaccgaccgcaacttcaccgccacccagtacgcattgctggtctcgctggccaacctgccgggcaagttcgtcggtggcgtctccggctacatcgtcgaagccacgtcctacagcacgttcttcatcctcagctcgatcaccgtggtgccaaccctgctgctgctggcgtggctgtggccgcggatcgccgatcgcgggccgccgccggtcgcctgattgcctgcccgcccggactgcgggatcatcgcccccgacgcgccgagggggcggtgccttgcgaacggggaagtgagcatggccgacgttgtgctgcgggacctggacccgctgctgctggaacgcatccgacgggtcgcggtcgcccgcggctggacccacgaacagacctgcgccgccttgctggagcaggggctgttcagcagtgaactggaggtccgctccggcttcggcgatcccgaagtggacgccctctccgccgcgattgccgccctgcaggccctgccggcagggcagggcttcgattagcgcctttgtagagccgagccatgctcggctgctcttggcccggcccggcccggcccggcccgcgctaagccgagcagggctcggctctacaacggcgcctcacctgcgcggacggcccacctcacgccaggtggatcgcccccaggatccgcgggcccgttgccccggtcacgctcggcaggttgcccgccagcccgtccatcgtccgctgcgccagccaggcgaaacccatcgcctccacgtactccgggtccagcccatgcaccgcgctggactcaacctgcacctccggcagccgcgccgccagccgcttcatcagctgccggttgcgcacaccgccgccacagaccagcaggcgccgggtctgcggctgctgcgccagcaacgcatcggccacggtcgccacggtcagctccagcagggtggcctgcacatcggcagcggcgtactcgccttcccccatgtgggcttcggcccaggacaggtgaaactgttcgcgcccggtgctcttcggcggcggcagcgcgaaccacgggtccgaacgccaggcggccagcaggccctcgtccaacgtgccactggcagcgtaagcgccatcggcatcgaaggtgcggccggtatggcgctggcaccaggcgtccatcagcgcattggccgggccggtatcgaagccacgcaccgcgccttcgcgcgggatcagggtcagattggcgatgccgcccaggttgagcaccgcgcggtcttcgtcggcggtgcccagcatgcccaggtggaaggccggcatcagcggcgcaccgtggcccccggccgccacgtcgcggcggcggaagtcggataccgtcgtgatcccggtcagttcggcaatgcggttgccgtcgcccagctgcacggtgaacgccgggtcggccagcgggcggtggcgcacggtctggccgtgcgagccgatcgcgcgcacctggctgcggtccacgccggcctcggccagcagttgattggcggccccggcgaagttgatcgcgatccgcgcgtccagttcgcccagttcctccagcgactccagcgggccaccttcgcccagcgccaccagccgcgcgcgcagcaccggctcccagcgggcggtcaggccgtgcacgaagcggcagccaccgccggcggggaactgcaccagcgcggcatcgatgccatcggcgctggtgcccgacatcaggccaaggtacaggggggcgtcagcgtcggcagtcgtgttcatggcaggcataaaaaaaggacgcggcaagcttgggctgccgcgtccttcttcgtcaacgcaagacgctcagccgcgcttgcggccggtcgcctgcttgtccttggcgctggccacctcgggcgcagcctcgtcgcggctggtcggtgccgggctggcgtcggcgtagatcagcttctccatgccctggatgcgcgccatcgccggcgcggtctgcgcgcggaaggcgaccagctcggcgcccttcagcggttccggcggcggcatggtcacggtcagcgggttgcggtgctcgccgttgacgcggaattcgtagtgcaggtgcgggccggtcgccaggccggtcgagccgacatagccgatcaccgtgccctgggccacgcgctggccggtcttgatgttcgcaaagcgcgacatgtggccgtacagggtggtgtggccgcggccatggtcgaggatcaccacgttgccgtagccgcgctgcacgccggcgaactgcacgcgggcatcgcccgcggccatgatcggagtgccggtgcgcgcggcgtagtccacgcccttgtgcatgcgcatcttgcccagcaccgggtgcttgcgtgcgccgaaggtcgaactcagccgcgcgaacgggatcggcatgcggatgaagctcttcttcagcgaacggccgttgatgtcgtagtactcggacttgccgttgcggtcgaagcggaagccggaataggtcttgccaccggtggtgaaggtcgccgccaggatcttgctggtgtccaccttctcgccttcgcgccaggtttcatccatcaccacgctgaagcggtcgcccggctgcaggtccttggagaagtcgatgtcgtacttgaagatgtcgtcggtcatcgtcgcgatcgccgacggcgacagcccggcccgtcgggccgcggcatacagcgaactggtgatctcgccgctggtgaccacggtgcgcgtggaggactcgcgcttggtcactttctccttgatgtcatcgccggccaggctcagttccacgcggttgtcggcatcgcggtcgaaacggatgctgcgcaggtcgccggacagcggcatgtcgaaggcgatctcggcacccgggcgcagcttggtcaacgcctcacgcgcgccggggtggtccagcacccggtgcagggtggtggccggaatgccagccttgtcgaacaggtcgctcagggtctggccacgctgcacgcgcagcacctgccagctgtcacccggcacctgctgctggcgggccatggtcagcggcggcaacggcagcgccaggctggtgtggctgtcggcgtaaggcgcatcgatggtgtgcgagaaaccggggacgatcgtcgccaccagggcgccgatggtcgcaaacaggctggcatgcatccaatggcggcgggtccagcgctcattgaaggcggcgggaagatgttgcctgagcttccgatgcagggtgttgtcgtgcaggacgtggaggcgttcctggaagcgctgcttgcgtgcgcgcccttgttcggaattgtgcatcggcggttttttcctggcggcctgggagtgcgggcctgatcgccggttaccatagacacctgagaaaaccgcgtcaaacccttgtgcccattggcttttgtgaagccaatcgggttaacttcgctttaacaccccacacaagaatcggcgttgccgggagtagtcacgtgtcctcgattgaagaagcccttgccctgatcggccgtggtgccgacgagatcctcaagctcgaggatctgcgtgcgcgcctgcaggaaggccgcccgctgcggatcaaggccggcttcgaccccaccgcgcccgacctgcacctgggccatacggtgctgctgaacaagatgcgccagttccaggacctgggccaccaggtcattttcctgatcggcgacttcaccggcatgatcggcgacccgtccggcaagagcctgacccgcaaaccgctcagccgcgatgacgtgctggccaacgcccgaacctacgaggaacaggtgttcaaggtgctcgaccgcagccgtaccgaagtccgcttcaactcggagtggttcggcaagatgggcgcggccgacatgatccgcctggccggccagcacaccgtggcgcgcatgctcgagcgcgacgacttcgccaagcgctatgccgcccagcagtccatcgccatccacgagttcctgtacccgctggtgcagggctacgattcggtggccctggaggccgacgtcgaactgggcggtaccgaccagaagttcaacctgctgatgggccgtggcctgcaggaacaccacggccagaagccgcaggtggtgctgaccatgccgctgctggaaggcctggacggcgtcaacaagatgtccaagtcgctgggcaactacattggcatcagcgagccggccatcgacatcgtcaccaagaccatgaaggtggacgacaccctgatgtggcgctggatcgaactgctgtccttcgacatcagccaggccgaagccgtgcagctgcgcgagcaggtggccaatggcggcttgaacccgcgtgtggtcaagctgcgcctggcgcgtgaactggcgacccgtttccacgacgccgccgcggccgagcaggccattgcaggctgggaagcagcggtgaccgggcagggtgacattacccagctgccgctgcaggacgtggcgattccggccgaaggactgcgtatcgctgcgctgctgacggcggccggcctgaccccgagcaactctgaagccaatcgcaagctcaaggagcgcgcggtcaaggtcgacggtgaagtggtcgaagatggccagcaggtgctgcagccgggcttcgaaggcctgctgcaggtcggcaagcgtactttcgcccgcgtgcgcctggtcactgcctgacagcagggaagggccggcgccagccggcccttccttatgctcttgtagagccaagcctacgcttggctgcgcttcgcgggtttctaccgcagcgcgacggatgaacagatgcaacatccggtgaaaaaaatcgccacacccccttcacaaatgatgtggatggggccatacttctcctcccccgtcgcaggggtcgccaccaaggggcttcagcgacatcagggtgcccaccaccgccgaacgagatgatcgaacgaaggtgttgacggactgaaaaagtctggcataatgggcggctcgctacgaaggaaacttcgcagcacacgggaacggcgctgaggccacttccccggatctttgaaagtatgcgcaggtatcttgtgaaggcgcctgcaggaaggatgattgtccatcttgcagacgtttgatcaagcaactattaattgttttaaagcaagcgatacgttgccagaatcaatcatctgcagctttaaattttgatcttcggatcatgtagttttaagtgaagagtttgatcctggctcagagtgaacgctggcggtaggcctaacacatgcaagtcgaacggcagcacaggagagcttgctctctgggtggcgagtggcggacgggtgaggaatacatcggaatctactctgtcgtgggggataacgtagggaaacttacgctaataccgcatacgacctacgggtgaaagcaggggatcttcggaccttgcgcgattgaatgagccgatgtcggattagctagttggcggggtaaaggcccaccaaggcgacgatccgtagctggtctgagaggatgatcagccacactggaactgagacacggtccagactcctacgggaggcagcagtggggaatattggacaatgggcgcaagcctgatccagccataccgcgtgggtgaagaaggccttcgggttgtaaagcccttttgttgggaaagaaatccagccggctaatacctggttgggatgacggtacccaaagaataagcaccggctaacttcgtgccagcagccgcggtaatacgaagggtgcaagcgttactcggaattactgggcgtaaagcgtgcgtaggtggtcgtttaagtccgttgtgaaagccctgggctcaacctgggaactgcagtggatactgggcgactagagtgtggtagagggtagcggaattcctggtgtagcagtgaaatgcgtagagatcaggaggaacatccatggcgaaggcagctacctggaccaacactgacactgaggcacgaaagcgtggggagcaaacaggattagataccctggtagtccacgccctaaacgatgcgaactggatgttgggtgcaatttggcacgcagtatcgaagctaacgcgttaagttcgccgcctggggagtacggtcgcaagactgaaactcaaaggaattgacgggggcccgcacaagcggtggagtatgtggtttaattcgatgcaacgcgaagaaccttacctggccttgacatgtcgagaactttccagagatggatgggtgccttcgggaactcgaacacaggtgctgcatggctgtcgtcagctcgtgtcgtgagatgttgggttaagtcccgcaacgagcgcaacccttgtccttagttgccagcacgtaatggtgggaactctaaggagaccgccggtgacaaaccggaggaaggtggggatgacgtcaagtcatcatggcccttacggccagggctacacacgtactacaatggtagggacagagggctgcaagccggcgacggtaagccaatcccagaaaccctatctcagtccggattggagtctgcaactcgactccatgaagtcggaatcgctagtaatcgcagatcagcattgctgcggtgaatacgttcccgggccttgtacacaccgcccgtcacaccatgggagtttgttgcaccagaagcaggtagcttaaccttcgggagggcgcttgccacggtgtggccgatgactggggtgaagtcgtaacaaggtagccgtatcggaaggtgcggctggatcacctccttttgagcaaagacagcatcgtcctgtcgggcgtcttcacaaagtacctgcattcagagaatcatgtcggccaggccgatatgagagtcccttttggggccttagctcagctgggagagcacctgctttgcaagcagggggtcgtcggttcgatcccgacaggctccaccatgtttgagtttgttccggaaagttttccgggtctgtagctcaggtggttagagcgcacccctgataagggtgaggtcggtagttcgagtctacccagacccaccattctctgaatgacgcatacaatcgatctttatacgcatcagcactgtggctggtacgtgttcttttaaaacttgtgacgtagcgagcgtttgagatgttctatcagacgtgtcgtaaggctaaggcgagagacgcaagtctctttattgattgagtcgttatattcgtatccgggctttgtacccccgggtcatatgtaacccaaggcaacttgcggttatatggtcaagcgaataagcgcacacggtggatgccttggcggtcagaggcgatgaaggacgtggcagcctgcgaaaagtatcggggagctggcaacaagctttgatccggtaatgtccgaatggggaaacccacccgcttgcgggtatcctgcagtgaatacatagctgctggaagcgaacctggtgaactgaaatatctaagtaaccagaggaaaagaaatcaaccgagattccgtaagtagcgacgagcgaacgcggactagcccttaagctgatttggttctaggaaaacactctggaaagagtggccatagaaggtgatagccctgtatctgaaagggccatttcagtgaagacgagtagggcggggcacgtgaaaccctgtctgaacatggggggaccatcctccaaggctaaatactactgaccgaccgatagtgaaccagtaccgtgagggaaaggcgaaaagaaccccggagaggggagtgaaatagaacctgaaaccgtgtgcgtacaagcagtaggagctccgcaaggagtgactgcgtaccttttgtataatgggtcagcgacttactgttcgtggcaagcttaaccgtataggggaggcgaagggaaaccgagtctgataagggcgcatagtcgcgggcagtagacccgaaaccgggtgatctagtcatgcccagggtgaaggtgcggtaacacgcactggaggcccgaacccactcccgttgcaaaggtaggggatgaggtgtgattaggagtgaaaagctaatcgaacccggagatagctggttctcctcgaaagctatttaggtagcgcctcatatgtatcctctcgggggtagagcactgttatggctagggggtcatcgcgacttaccaaaccattgcaaactccgaataccgagacggactgtatgggagacacacggcgggtgctaacgtccgtcgtgaaaagggaaacaacccagacccacagctaaggtcccaaattttgtgctaagtggaaaaccatgtggaaaggcacagacagccaggaggttggcttagaagcagccaccctttaaagaaagcgtaatagctcactggtcgagtcggtctgcggggaagatttaacggggctaagcacagaaccgaagcttggggtgcatactttgtatgcgcggtagaggagcgttccgtaagccgttgaaggtggattgagaagtctgctggaggtatcggaagtgcgaatgctgacatgagtaacgataatgcgggtgaaaaacccgcacgccgaaagcccaaggtttccttgcgcaacgttaatcggcgcagggtgagtcggcccctaaggcgaggacgaaagtcgtagtcgatgggaagcaggttaatattcctgcacctcgcgtaagtgcgatggagggacggagaaggttaggtgtaccaggcgttgattgtcctggggaaaggcggtaggtttggatctttggcaaatccgggatcctctaagaccgagcaccgagacgagcctttaaggcgaagtcactgataccacgcttccaggaaaagctcctaagcttcagcttacgcagaccgtaccgtaaaccgacacaggtgggtaggatgagaattctcaggcgcttgagagaactcgggtgaaggaactaggcaacatggcaccgtaacttcgggagaaggtgcaccctttttggtggctcgtgcgagctatagctgaagagggtcgcagtaaccaggccgctgcgactgtttatcaaaaacacagcactctgcaaacacgaaagtggacgtatagggtgtgacgcctgcccggtgctggaaggttaattgatggggtcagccgcaaggcgaagctcttgatcgaagccccagtaaacggcggccgtaactataacggtcctaaggtagcgaaattccttgtcgggtaagttccgacctgcacgaatggcgtaacgacagcggcgctgtctccacccgagactcagtgaaattgaaatcgctgtgaagatgcagcgttcccgtggcaagacggaaagaccccgtgaacctttactatagctttacactgaacgttgagttcgtctgtgtaggataggtgggaggctatgaaaccatggcgctagctgtggcggagccatccttgaaataccaccctgtcgtgcttgacgttctaacctgggcccattatctgggtcggggaccgtgtatggtgggtagtttgactggggcggtctcctcctaaagagtaacggaggagctcgaaggtacgctcagcgcggtcggacatcgcgcactgtgtgcaaaggcataagcgtgcttgactgcaagatcgacggatcaagcaggtaggaaactaggacttagtgatccggtggttctgtatggaagggccatcgctcaacggataaaaggtactccggggataacaggctgataccgcccaagagttcatatcgacggcggtgtttggcacctcgatgtcggctcatcacatcctggggctgtagtcggtcccaagggtatggctgttcgccatttaaagtggtacgcgagctgggttcagaacgtcgtgagacagttcggtccctatctgccatgggcgttggagatttgagaggggctgctcctagtacgagaggaccggagtggacgaacctctggtgttccggttgtcacgccagtggcattgccgggtagctatgttcggaagcgataaccgctgaaagcatctaagcgggaagcgcgcctcaagatgagatctcccggggcacaagccccctgaaggaaccatgtagactacgtggttgataggtcaggtgtgtaagtacagcaatgtattgagctaactgatactaatgatccgtgcggcttgaccatataacctcaagttgccttggctttacgacagcgtcgtaagagcatccaagtgcacgctacgtcacaagaactatgcgaggctggcgccttgtcccccaggacgagtgcgacactccaaaagcctccctggtgaaattagcgctgtggaaccacccgatcccatcccgaactcggaagtgaaacgcagctgcgccgatggtagtgtggctcaagccatgcgagagtaggtcatcgccagggtttacacccgagaaccccgctgcatgcgcagcggggttttcctttttttgcaggcatctggtttcgacctggacttgcggcaacaacttcacgaagagcttcaagttcctcaaacaagttgttgacaaagctgaaaggcctgccataataggcggctcgcaacgacgaaaggccctcgggcccaacgacgaagcagcatcggcaacaacgtccactccggtgagacggccttgaaaaaaggtgttgacgaagcggaaaagccggctataatgggcggctcgctacgaaggaaacttcgcagcacacgggaacggcgctgaggccacttccccggatctttgaaagtatgcgcaggtatcttgtgaaggcgcctgcaggaaggatgattgtccatcttgcagacgtttgatcaagcaactattaattgttttaaagcaagcgatacgttgccagaatcaatcatctgcagctttaaattttgatcttcggatcatgtagttttaagtgaagagtttgatcctggctcagagtgaacgctggcggtaggcctaacacatgcaagtcgaacggcagcacaggagagcttgctctctgggtggcgagtggcggacgggtgaggaatacatcggaatttactctgtcgtgggggataacgtagggaaacttacgctaataccgcatacgacctacgggtgaaagcaggggatcttcggaccttgcgcgattgaatgagccgatgtcggattagctagttggcggggtaaaggcccaccaaggcgacgatccgtagctggtctgagaggatgatcagccacactggaactgagacacggtccagactcctacgggaggcagcagtggggaatattggacaatgggcgcaagcctgatccagccataccgcgtgggtgaagaaggccttcgggttgtaaagcccttttgttgggaaagaaatccagccggctaatacctggttgggatgacggtacccaaagaataagcaccggctaacttcgtgccggcagccgcggtaatacgaagggtgcaagcgttactcggaattactgggcgtaaagcgtgcgtaggtggtcgtttaagtccgttgtgaaagccctgggctcaacctgggaactgcagtggatactgggcgactagagtgtggtagagggtagcggaattcctggtgtagcagtgaaatgcgtagagatcaggaggaacatccatggcgaaggcagctacctggaccaacactgacactgaggcacgaaagtgtggggagcaaacaggattagataccctggtagtccacgccctaaacgatgcgaactggatgttgggtgcaatttggcacgcagtatcgaagctaacgcgttaagttcgccgcctggggagtacggtcgcaagactgaaactcaaaggaattgacgggggcccgcacaagcggtggagtatgtggtttaattcgatgcaacgcgaagaaccttacctggccttgacatgtcgagaactttccagagatggatgggtgccttcgggaactcgaacacaggtgctgcatggctgtcgtcagctcgtgtcgtgagatgttgggttaagtcccgcaacgagcgcaacccttgtccttagttgccagcacgtaatggtgggaactctaaggagaccgccggtgacaaaccggaggaaggtggggatgacgtcaagtcatcatggcccttacggccagggctacacacgtactacaatggtagggacagagggctgcaagccggcgacggtaagccaatcccagaaaccctatctcagtccggattggagtctgcaactcgactccatgaagtcggaatcgctagtaatcgcagatcagcattgctgcggtgaatacgttcccgggccttgtacacaccgcccgtcacaccatgggagtttgttgcaccagaagcaggtagcttaaccttcgggagggcgcttgccacggtgtggccgatgactggggtgaagtcgtaacaaggtagccgtatcggaaggtgcggctggatcacctccttttgagcaaagacagcatcgtcctgtcgggcgtcttcacaaagtacctgcattcagagaatcatgtcggccaggccgatatgagagtcccttttggggccttagctcagctgggagagcacctgctttgcaagcagggggtcgtcggttcgatcccgacaggctccaccatgtttgagtttgttccggaaagttttccgggtctgtagctcaggtggttagagcgcacccctgataagggtgaggtcggtagttcgagtctacccagacccaccattctctgaatgacgcatacaatcgatctttatacgcatcagcactgtggctggtacgtgttcttttaaaacttgtgacgtagcgagcgtttgagatgttctatcagacgtgtcgtaaggctaaggcgagagacgcaagtctctttattgattgagtcgttatattcgtatccgggctttgtacccccgggtcatatgtaacccaaggcaacttgcggttatatggtcaagcgaataagcgcacacggtggatgccttggcggtcagaggcgatgaaggacgtggcagcctgcgaaaagtatcggggagctggcaacaagctttgatccggtaatgtccgaatggggaaacccacccgcttgcgggtatcctgcagtgaatacatagctgctggaagcgaacctggtgaactgaaatatctaagtaaccagaggaaaagaaatcaaccgagattccgtaagtagcgacgagcgaacgcggactagcccttaagctgatttggttctaggaaaacactctggaaagagtggccatagaaggtgatagccctgtatctgaaagggccatttcagtgaagacgagtagggcggggcacgtgaaaccctgtctgaacatggggggaccatcctccaaggctaaatactactgaccgaccgatagtgaaccagtaccgtgagggaaaggcgaaaagaaccccggagaggggagtgaaatagaacctgaaaccgtgtgcgtacaagcagtaggagctccgcaaggagtgactgcgtaccttttgtataatgggtcagcgacttactgttcgtggcaagcttaaccgtataggggaggcgaagggaaaccgagtctgataagggcgcatagtcgcgggcagtagacccgaaaccgggtgatctagtcatgcccagggtgaaggtgcggtaacacgcactggaggcccgaacccactcccgttgcaaaggtaggggatgaggtgtgattaggagtgaaaagctaatcgaacccggagatagctggttctcctcgaaagctatttaggtagcgcctcatatgtatcctctcgggggtagagcactgttatggctagggggtcatcgcgacttaccaaaccattgcaaactccgaataccgagacggactgtatgggagacacacggcgggtgctaacgtccgtcgtgaaaagggaaacaacccagacccacagctaaggtcccaaattttgtgctaagtggaaaaccatgtggaaaggcacagacagccaggaggttggcttagaagcagccaccctttaaagaaagcgtaatagctcactggtcgagtcggtctgcggggaagatttaacggggctaagcacagaaccgaagcttggggtgcatactttgtatgcgcggtagaggagcgttccgtaagccgttgaaggtggattgagaagtctgctggaggtatcggaagtgcgaatgctgacatgagtaacgataatgcgggtgaaaaacccgcacgccgaaagcccaaggtttccttgcgcaacgttaatcggcgcagggtgagtcggcccctaaggcgaggacgaaagtcgtagtcgatgggaagcaggttaatattcctgcacctcgcgtaagtgcgatggagggacggagaaggttaggtgtaccaggcgttggttgtcctggggaaaggcggtaggtttggatctttggcaaatccgggatcctctaagaccgagcaccgagacgagcctttaaggcgaagtcactgataccacgcttccaggaaaagctcctaagcttcagcttacgcagaccgtaccgtaaaccgacacaggtgggtaggatgagaattctcaggcgcttgagagaactcgggtgaaggaactaggcaacatggcaccgtaacttcgggagaaggtgcacccttttttggtggctcgtgcgagctatagctgaagagggtcgcagtaaccaggccgctgcgactgtttatcaaaaacacagcactctgcaaacacgaaagtggacgtatagggtgtgacgcctgcccggtgctggaaggttaattgatggggtcagccgcaaggcgaagctcttgatcgaagccccagtaaacggcggccgtaactataacggtcctaaggtagcgaaattccttgtcgggtaagttccgacctgcacgaatggcgtaacgacagcggcgctgtctccacccgagactcagtgaaattgaaatcgctgtgaagatgcagcgttcccgtggcaagacggaaagaccccgtgaacctttactatagctttacactgaacgttgagttcgtctgtgtaggataggtgggaggctatgaaaccatggcgctagctgtggcggagccatccttgaaataccaccctgtcgtgcttgacgttctaacctgggcccattatctgggtcggggaccgtgtatggtgggtagtttgactggggcggtctcctcctaaagagtaacggaggagctcgaaggtacgctcagcgcggtcggacatcgcgcactgtgtgcaaaggcataagcgtgcttgactgcaagatcgacggatcaagcaggtaggaaactaggacttagtgatccggtggttctgtatggaagggccatcgctcaacggataaaaggtactccggggataacaggctgataccgcccaagagttcatatcgacggcggtgtttggcacctcgatgtcggctcatcacatcctggggctgtagtcggtcccaagggtatggctgttcgccatttaaagtggtacgcgagctgggttcagaacgtcgtgagacagttcggtccctatctgccatgggcgttggagatttgagaggggctgctcctagtacgagaggaccggagtggacgaacctctggtgttccggttgtcacgccagtggcattgccgggtagctatgttcggaagcgataaccgctgaaagcatctaagcgggaagcgcgcctcaagatgagatctcccggggcacaagccccctgaaggaaccatgtagactacgtggttgataggtcaggtgtgtaagtacagcaatgtattgagctaactgatactaatgatccgtgcggcttgaccatataacctcaagttgccttggctttacgacagcgtcgtaagagcatccaagtgcacgctacgtcacaagaactatgcgaggctggcgccttgtcccccgggacgagtgcgactctccaaaagcctccctggtgaaattagcgctgtggaaccacccgatcccatcccgaactcggaagtgaaacgcagctgcgccgatggtagtgtggctcaagccatgcgagagtaggtcatcgccagggttttatacccaaaaccccgctgctcacgcagcggggtttttcttattaagtgaaggcactgcattttccgggtcccttccgccccaagggcaagatcgcgaagctggcgctgcaagcgctgctgcaaccgtctccctggtgaaattagcgctgtggaaccacccgatcccatcccgaactcggaagtgaaacgcagctgcgccgatggtagtgtggctcaagccatgcgagagtaggtcatcgccagggtttacacccaaaaccccgctgctcatgcagcggggtttttctttgtgcgcaggaaaccccggtagtgccggccgctggccggcaatccgatggcgttgcattgcccggtagatccacgccatgcgtaagtgctccgcgaggagcatggcgccaaccagagttggccgctaccaatcgattgccggccagcggccggcactaccggcagatccacaccaaccgtggatgagccgccgacggtacgcaaaagaaaagcggcgccccgtggggcgccgctctgctctcaacagtgctcagtcgagcatggcccgactttacttggccgagaccttgtccttcatcatcgcgtcgcgggctgccttgaacggattgcctgcataccagttcggccaacgatcgccaccggccagttccttgcccacgccgtacatcagctgcaggtcttcgacggtgccgtccagcttccaggtggcggcgtcgaactcgtccttcgggccgtggtaacggttggcgccgtagtccgccgccgccttgcggcccgcttccacgccaccctcgcgcaggtcttcgccgccatcggcgtacagggccggcacacccgcttttgcgaagttgaagtgatcggagcggaagtagaagccgctctgtaccgaggtctcaccgtgcagggtgcggtcctgggcggcggccagcggcttgaggatgtcctccagctccgagctgccgaagccggtgacggtcacgtccttggcacggccggccaccgacatcgcatcgatgttgatcacaccggcgatcttgtccagcgggaaggtcgggtgggcgacgtagtacttggaacccagcaggccggactcttccagggtcaccgccaggaacaccaccgaacgctccggcttcggctcctggtgggccatggcttcggccacttcgagaatgccagccacgccggtggcgttgtcgaccgcgccgttgtagatgttgtcgccggtctcaccctcatgcttgcccaggtggtcccagtgcgccatgtacaggacggcctcgtcagcgcgcttgctgcccggcagcacgccgaccacgttgcgcgactgcttctgtgcgatctggctcttcaggtcgaccgcagcggtggccttcagcggcactggcttgaaaccgcgcttgctggcgtccttgtaggcctgggcaaggtccgggccggcaccggcgaacagtgccttggccgcgtcggcgctcagccagccctgtaccgggatgcgcgcttccgggtcatccttggcgggcaggtcgtactgcgggccagcccaggaattcttcaccacgtcccagccgtaggacgcgccggcggtgtcgtgcacgatcagcgcggcggcggcgcccttgcgggcggcctcctcgaacttgtaggtccagcggccgtagtaggtcatgcgcttgccgtcgaacagcttcgcgtcgtcgacgtggaagcccgggtcgttgacgaacatcacgaccgtcttgcccttccagtcctgaccggcgtagtcattccacttctgctccggcgcatcgacgccatagccgacgaacaccaggtcgctggcatcgaccttcacctcggcctggccggtacgggtgccgaccaccatgtcggtgccgaacttcagttcggtggtcttgccgccctgggtgatcttcagcacggtcgattcgtcggccgtggtctcggtcatcggcacatcctggaaccagctgtcgccgttgccgggctgcaggccgatgcgctgcatctggtcgcggatgtagttgaccgtcagttcttcgcccttgctgcccggggcgcggccttcgaactcatccgaagccagggtcttgaccatctcggcgaagtcgccggcgttgatctccggtgagaactgatgggcggccggcttcgcggcagcggtatcggtgggcggcgtggcagccggcgtggattcgcctttgcaggcactgagcgcggccgcggcggccaagcacaggaggagtttgcggggcatcgtcgattcctggagaacaaagggcggtcgcatctcatgcgcgaccggtaaacgcgagtatcactgaagcgccgggtgcgacgggttcagtcggccggcgcggtttcggtatcgaacgggatcggctcggccccggtgaccgggccgatgcgtgcggtgcgatgcacgtacagcaccacctcgcgctcgaactgcagcggcccactgacgaccgcgttggggccgatgatcacgcgcggcttgcggctggcggtgagcgagacactgaagttcggcttgcgcacatgcacgccgccgttgacctgcgaaccgatgccgacggtgatgtcaccgttgacggtctcgacgtctttgccgacgcggctctcgaccaggccgatgccgccgttcacggtctcgacgccgccttcgatctggctgccgcgatcagtgaagatgctgccgttgacggtgctgacgccaccgctggcgatcacttcacgacccaggcggacaccgccgttgacggtctcgatcttgccggtgcgtgcgcggtcggcaaccttcaccccgccgttgacggtgtcgatgcttccggtctcgacgccttcgccgacgcggatgccgccgttgacggtgtccagcttgccgtagcgttggccgggttcggcgctgatgctgccgttgaccttgctgatgttctcctgggcgcagaccggcccggtgaccagcagtacgcccaacagcagcggaatggatagagttttcatgggaacctcaatggatgtgcggctggcaggccgcgtgcggagatgtcaccattccccggtaccccccgcaactgcctgaagtcactggaaagcccttgcgcgacaacgccttcccatcacgccgacatcacatcgccgccgtacgcggcgggcgctggctgctgctggggctggctgtggcgctggccctgcccctgccgggtgctgcgcagaccacccgcgagaccgagcgcaagctgcagaagctgcgtaccgagctgaagggcgtggcgcaggagcgacggcagatcgaagggcagcgtggccaagcatcgcaacagctgcgcgaggccgacgagaaggtggcacgcaccggccgcgcgcttgcgcagaccgaagcggcgctgcgtgagcaggcccaggccctggcccaggccgagcagcgccgcagcagcctgcaaaccaacctggcccagcagcaccgcgaactggccggcctgctgcgcgcggcgtatcagcttggcaatcacgcaccgctgaagctgctgctgtcgcaggacacggtggccgatgccaatcgcgccctggcctaccatcgttacctgcagcgcgaacgagcgcagcgcatcaccacgctcaccgccgacctgaaggaactggaagcgctgcaggcgcagatcgccgagcgcaagcagaagctgcagggggcgcagcaggaccagaagcagcaggcagcggcgctggcggccgaccgccgtgaccgcgcgcagaccgtggcctcgctcgacgaacgcttcaaggaccggcgcgagaaggaacaggcactgggccaggatgccaaggcgctggaaacgctgctggccaatctgcgtgccgctgccgcccgggccgaagccgagcgtcgcgcggcggcacgtcgagctgctgccgaaaaggccgctgccgagcgggccgcacgccaggcggccgcacagggccggccaccgccgccggcaaccaaggttccacctgcggtggcgtcggcaccggcaccgaaggtcggcggcctgggttggccgttgtccggcaacctgctggcccgctatggcggcaagctgcccgatggccgtaccagcagcggcgtgctgatcggcgcgccggccggcagcaccgtcacggccgtggccgacggcaccgtggtgttctccgactggatgaccggctacggcatgatcctgatcgtcgaccacggcaatggctacatgagcctgtatgcccacaacgacaccctgctgaaggatgccggcgcacgggtcagccgcggtgatgcggtggccaaggtcggcaattccggtggccagggcgtcaccgcgctgtactttgagctgcgccgtggcgggcagccggtcaacccggacagctggctgcagcggcgctgaatccaggcctgccggatgcgggttggattcaacgggaatttagctgtgcttcgcgcataatcggtgcatgtgccttgggcacgatgccaacgtcgacaggagtgatccatgcgcgcagcccgtaccgccaccctcttgctggccctgttgccagcgctgtcctgggcgcagcagaccgcgcccgccccgagccaggaaaccagcgggcaggcagcgaacagcgaggaggcggtgacctcgaaggtgccgctggaggacatccgccgtttcgtggccgtgtacaacgcggtgcgcgccgcctatgtcgatccggtcgatgacaagaagctgatgcagtcggccgtgcgtggcctgctgctcgacctcgatccgcacagcacctacttcaacaaggaagacgcgcaggccttcgacgagcaggccaatggtgcctacgagggcatcggcgtggagctgcagcagcagccggacaacgccagcatgaaggtgatcgcgccgatcgacgacaccccggcggccaaggccggcatcctcgctggtgacctgatcatcgccatcgacggcaagccgatcagtgcaatcgatgccagcgagccgctgcgcggcccggccggcagcaaggtggtgctgaccatcgtgcgcgaaggcaagcccaagccgttcgacgtgagcctcacccgccagaccatccgcgtgaccagcgtgcgcagccgcctgctggaacccggctatggctacatccgcctgagcaccttccaggccgataccggttcggacttccagaagcacgtgcagcagctgcagaagcagtccggtggccagctcaagggcctggtgctggacctgcgcagcaacccgggtggcctgctgaccgctgccgtgcaggtggccgatgatctgctcgacaagggcaacatcgtcagcacccgtggccgcatcagcatcagcgatgcacgattcgacgcgaccccgggcgacctgctgaagggcgcaccggtggtcgtgctggccgatgccggttcggccagtgcatcggaagtcctggccggcgcgctgcgcgacaacaagcgtgcgcgcgtggttggcagccgtaccttcggcaagggctcggtgcagaccgtgctgccgctggacaacggtgattcggtgaagctgaccaccgcgcgctattacacgcccagcggcaaatcgatccaggccaccggcatcgtgccggacgtcgagctgaaaccggccgccacgccggccgaggatgcactgccggccagcctgagcgactacagcgaagccaccctgccgggccatctgcgcggcgatgacgaaggcaccgagggctaccacgccggtgcggtgctgccgggcgatggcccgatcaacgacgcgctggccgagctgaagaacccaggctcggtggccgcacggttgaaggccgaggccgccaaggcggatgcggccaaggccgcgaaggccgctgcggcgaagccggaagcaaagcccgaagcaaagccggaagcaaagccggaagcaaagccggaagcaaagccggaagcaaagccggaagcaaagcccgaacccgtcccggccaagccttgattttgtagagtcgagccatgctcgactgatctacgaacgagcgggtgagcgtggagccggccagcggccggcactaccaggggtcagaatccgtgccgcttgcgcaggcggcgcgcgatcgcggcgcgcacgtacacgccatacaccacgccgaacacgaagccgccgatgtgcgcccaccaggccaccatgccgaagctggggccgatatgggcgaacaccacctgcagcgcggcccagacgccgatcagcaggtaggccggggcgcgcacgaactccaggaacaggcccagcgggatcaccacgcccagccgggcaccggggaacagggccagataggcgccgatcagcgccgacaccgcgccgctggcgccgatgatgatctggtccgggctgcccatggtgtagatcgccaccaggttcgataccgcgccgcccacgaggaacagcagcagcaaccgccagggtcccaacacccgctcggcggggaggccgaagatcagcaggaacaccaggttgcccagcaggtgcgaccagtcggcgtgcaggaacagcgcagtgaacaggcgcagcacgctgccgtcctgcagggtcgcccaccagtccagcggacgggtcaggccggtggacagggcgccccagtccagccagagactgccgcgggcatcgtccgggcgcgagatcgaccacaggaatgccagccacaatgacgcgaacagcacgggcgtggcccagcgcagggccgccttcttgcgcgacgggagggagacgaacatgccaatagcctagcgtgcggccacgttcggtggggacggtcctgttcagcttttgagacgaaaaaaccgcctgcgctgttattgtttcattaacagctctgggtaatactcgcatacggcgtcgtatgtcgggaggggaatccggcgcgctccgatgggtcccaggacccggcgggcgcaggcgcactcagagcaccatcaccgcttaccggagagagaactacgatgcaaaccgcttccaccattgcccgactgaccctgctggccgtcggcgttgccggtgcgctggccgccgccgatgccaatgctgccgccttccagctgaaggaaaacagcgccaagggcctgggccgcgcgttcgccggctccacctcgaccgaaggtgacgcctcggtcatcgctaccaacccggcgtccatgcgcctgctcgacggcaccctggtccagggcgacgtcagcgccatcagcttcggcgccaagttccgcggccagggcaagtacgccaacggcgcgccgatttccggtggcaacggcggcgacgccggcatgatcgccccggttccggccgcgtacttccacgtgccgttcggcgagaacgacaacatgcacttcggtgcttcgctgaccgtgccgttcggcttcaagaccgaatacgaccgcgactgggtcggccgctacaacggcgtcaagaccgagctgcaggccatcgacctgggcgtggcgttctcctatgacgtcaacccgtacctgtcgttcggtgcgtcggtgttcgccgagcgcctgaacgtcgacctgaccagcgctgtcgacaccggcaccgcgatcaacgccactgcccagcgcaccgctgcggcgcgtgtgctggctgccggcggcaccgcggcccaggctgcggcggcgtcgcaggcggctgcacgccaggccgcccagctcggcttctcgccgggcaccgccgatggctacctgcgcatcaagggcgatgaagtgtcggtcggttacaccctgggcatgaccgtcaccccggtggaaggcaccaacatcgcgttcagctaccgctcgaaggtcgagcacaagatcaccgacggcaaggccgatttcaccatcccgcagaatgcggcggccttcctggccactgctgccccgggtaccttcatcgacagcaacggtcgcgcgaccatcaccctgccggccagcgccaccgtgggcttcacccaccgtgtgaacgaccagtggcagatcatggctgaagtcacgcgcaccgcgtggagcaagttcgaccaggtcgtcgtcgattacgactccaaccagccggacagcgtgctgccgttccactaccgtgacaccaccttcgcgtcgatcggtaccgatttccgcgtgaacgacaagctgaccctgcgcggcggcctggcctatgaccagaccccgaccaccgatgcccaccgcgacgtgctcgtgccggacaccacccgcaagtggctgtcgctgggcatgacctacgccgcttcggacaagatggaatacagcgtgggctacacccacctgttcaccaaggatccgaacatcacctcgacctcggccaccggcaacaccgtgaccggcaagtacaaggtcagcggcgacgtgctggcggcgtcgatgcagtacaagttctgattcgggcgattgcctggagcagtacgaaggaggccccgcgcaagcggggcctttctttttgtggggacgggccggggcgtccacgcagcgcacggatccacgacaatagcgacatgaacctgtccgatccgaacttccagctggagctggctgccaacatcgccgtcgccggctcgatcctgctggccggccgcaacaacgtgcacacctggtggctgggcatcgtcggctgcgccttgtttgctgccgtgttcgaacgatcgcatctgtatgcggacatggtgctgcagttcttcttcatcgccatcagcgtgctgggctggtggcagtggctgcgtggtgaccatggcgcgccgttgccgatcacttcattgcggccgcgcgcctgggcctggctggcgccgctggcggtagtggccacgttcggctacggctggatgctgacccgcctgaccaatgcctatgcgccgtacatcgattcggcggtgctggtgttgagtgtgatcgcgcagatcctgatgatgcgacgcaagctggaatcgtggtgggtatggctgctggtgaacaccgttgcggtgccgctctactacagccgtggcctgcacctgacctcgatcctgtatgtgggcttctggatcaacgcgctggtcgccttgcgccattggcggcacctgatgcgggacgaggcccgggcggccgatgccgctgcctgagcgcgttgcacgcggcctggtggtgggcaagttctgcccgctgcatctcggccatgaacgactgatcgacttcgccgccacgcgctgccagcagctgctggtgatcggctggtcgcagccgggctttgccggctacagcgctgcgcgccgcgagcgctggttgcgtgcgcgtttcccgcaggccacggtaacggtgcttggcgacgcgcgactggccgcattgtgcacgcagcatggcttgccggtgcgagcgctgccgcaggacagtgatgacgaacaggtgcagcgtgactttaccgcctggctgtgcctgaacctgttcggtgggccggtgcaggcggtgtacaccggtgaggactacggtgacggcttcgcgcaggcgctggccacgcacttcagtgcgccggtacgccatgagcggctcgaacgcgcattggacgtcgggcaggcctgcggcaccgagctgcgcagcgatccgcatgcgcatcgccatgggctcgcaccgcaggtgtatgccgaccatgtacagcgcgtggccttcatcggtggcgagtccagcggcaagaccacgctggcccgcgtgctggccgagcgtctgcagactgtctgggtgccggagtatggccgcacgctgtgggagcagcgaggcggagagctgacgccgggcgatctgctgcgcatcgcaatgacacagccacagcacgaagacgaagctgtgcggcgtgcgcatcgctggctgttctgcgataccacgccgctggtgacgctgggctacagcggctggatgtttggcacggcgccgcagccgctgcggcaagcggcacgacgacgctacgacctgctgttcctgtgcgcgccggatattccgtttgaccaggatggcacgcgcgtgggcgaagccttccgggcgcagcagcatgcgtggtacctggagcagctgcaggcagagggtgtcgagcatgtgctgctggaaggcgatctggagacgcgcatcgcacgcgtgcagggcgagctggcgaagcgggcggacaatcggttcagtgtggcccagcctctgtagagccgagcccacgctcggctgcgccagaaaagccgagcatgggctcggctctacagccaggaaagccgagcatgggctcggctctacagccggaaaagccgagcgtgggcccgcctctacaggaagcaaagcacaaaaaaccccgcgttcgcggggttttttgtttactgcatcaagcaggcgatcagtcgcccagggtcagcagcgaggcgttgccgccggcggctgtggtgttcaccgtcaccgtcttttcggtagcgaagcgcagcaggtagtgcgggccgccggccttcgggccggtgccggacaggccctggccgccgaacggctgcacgccgaccaccgcgccgatctggttgcggttgacgtagacgttgccgacgtggacgccgttgctgatgcgatcaacggtctcgtcgatgcgcgaatgcacgcccagggtcaggccgtagccggtggcattgatctggtcgatcaccgcgtcgagctggtcgcccttccagcggatcacgtgcaggaccggcccgaagatttccttgtgcagctggcccaggtccttcagttcatacgcgcgcggtgcgaagaaggtgccattggccgcttcggcggacagctcggcggccgcgatcaggcgcgcttcgcggtccatgcgctcggcgtggtcctgcaggatcttcagcgcgtcggcgtcgatcaccgggccgacgtcggtggacagcaggcccgggttgccgaccttcagttccttcatcgcgccggccagcatggtcatcaccttgtcggcgatgtcgtcctgcacgaacagcacgcgcgcggccgagcaacgctggccggcggaggtgaaggccgaaccgatcgcgtccttgaccagctgttccggcagcgccgaggagtcggcgatgaaggcattctggccgccggtctcggcgatcagcacaccgatggcggcgtcacgcgcggccatggcgcggttgatcgcacgtgcggtgtcggtggagccggtgaaggccacgccggccacgcgcgggtcggcggtcagtgcggcaccgacggtggcgccgtcgcccggcaggtactgcaccacctcggccggcacgccagcttcgtgcagcagcttcaccgcgtagtagccgatcaggttggtctgttcggccggcttggcgatgacgctgttgccggcggccagtgcagcagcgacctggcccaggaagatcgccagcgggaagttccacgggctgatgcagacgaacacgccgcggccgtgcagctgcagctcgttggactcaccggtcgggctgggcagcttctcggcgtggctgaactgctcgcgcgcctgcttggcgtagtagcgcaggaagtccacggcttcgcgcacttcggcgatgctgtcgggcaggctcttgccggcttccttcacgcacagcgccatgaactccggcatgcgcgcttccagctggtcggcggcgtgctcgaggatggcggcgcggctggcggccggggtgcggttccaggccggctgcgcggctacggcattcgccagcgccttctgcacggtggcggcatcggcggccagccactggccgaccacttcgcgggtgtcggccgggttggtcaccggcagcgaggcgccggccgggttcgcacccggcaccagcggggcggcctgccacggcttcacggccgcgttgagctgctcggcgagggcgcgcagttcgttgtcgttggcgaggttggcgcccatggagttcttcctgtcgtggttctggctgcgcagcaggtctaccggcagcgggatcttgggatgcggaatcgaagcgaacgaggcgaccatctcgaccggatcgcggatcaggtcggcgatcggcacgcgctcatcggtgatgcggttgacgaagctggagttggcgccgttttccagcaggcggcgcaccaggtacggcagcaggtcttcatgcgaaccgaccggggcgtacacgcggcagggcaggcccaggcgatcggccggcaccacttcggcgtacaggtcatcgcccatgccgtgcagcttctggtgctcgtacacgccaccgttggcgatgctgcgcaccgcagcgatggtgtgcgcgttgtgcgtggcgaacatcgggtagatcgcgtcggcatgggtgaacaggcgcttggcgcatgccaggtaggacacgtcggtgttctgcttgcgggtgaacaccgggtagcccggatagccttcgatctgcgcgcgcttgatctcggcatcccaataggcgcccttgaccaggcgcacctgcaggcggcgaccggcgcggcgcgccatgtcggccaggtggtcgatcgtgtacggtgtgcgcttctggtaggcctgcacgaccacgccgaagccgtcccagccggccagcgaggcgtcggagaacacctgctcgatgatgtccagcgacagttccaggcggtcggactcttcggcgtcgacggtgcagccgatgccgtagctcttggccagctgcgccagctccagcacgcccggcaccaggtccttcagcacgcgctcgcgcttggcgtgctcgtagcgcgggtacagcgccgacagcttgatcgagatgcccggtgcgttgttgacgtcgccatccgggcggccgccgcgggccttgtgatcaccgccaatggcgtggatcgcgcgacggtagtcttccaggtagcgcagcgcgtccttcatggtcagcgcgccttcgcccagcatgtcgaaggagtagcggtagttcgcgttgtcgcccttgtgcgagcgcgacagcgcctcgctgatggtgcggcccatgacgaactggtggcccatgatcttcatcgcctggcgcacggccaggcgcaccaccggctcaccgacgcggccgaccaggcgcttgaacgcgctgggcgcatcggcgcgggtggcgtcgttcatctgtaccagcttgccggtcagcatcaggccccaggtggaggcgttgaccagcaccgagtcgctgccgcccaggtgcttttcccagtcggcatcggccagcttgtcgcggatcagcttgtcggcggtgtcctggtccggaatgcgcagcagcgcttcggccacgcacatcagcagcacgccttcttcgctgcccaggtcgtactggcgcatgaaggcttcgatcgcgccctggtccttggcacgcacgcgcacgcggccgaccaggtcggcggccagcgcctgcaccctggcctgctcgtcggccggcagccgggcctgcgccagcagctcgcggacgtggctggcctcgtccttcaaccaggcatcggtgatggcctggcggaacgggttggggggcgccggcagttccggcgacagcagcacgccgggacgctgggcgtcgctggcggcaggggaggaggaaggtgcgttcatgccggtccggccaatggaaaacttggcgattttaatcatttttgcgggttgcggaagtgccccacagccaccttcgtgaagggctgatagcccctaacggtggtgtattcagcgtgttcagcaagcccggcaatatttgtgctgaattcggcattcgcgccgccgaccccatgctgtgttgcagcatgggaaaaagtgtgaatgcacccttgctaccggcgagagggcggggctaccatcgagacgtttcccgcggcaggaacgcggttgcgacatgatcgaggtgcttccagctccggatgggtcaggtacgcagctgcggctgcgtcccccacgggcgctcgatgcccggcagttcgtcctgttgttcaccgtgttgtcgggtgcgatgtggctggtgtccgccctcgggtggttggccggcaatgcattcgcccccctgttcgcgctgctgtacagcctggtgctggcggcggcactgcgtgccttgtggcgcagcggtgaacggcaggaggagatccgggtagtgccggcgtacgtggaggtcatccccgtacccggtggatcgccggtgttccgggcccacccccactgggtgcgcctgctcaccggcgatgagagggtccggctggcatccagcggccggcaggtggaggtggggagtttcctcgcgccggccgaacgtcagacgctcgcagagacacttgaaagcttgctcgccgccagcgatggcggcaaccgacgacgctaagggtctaggcaatgaagcaaagcagcaggtggggcacgaagtgcgttgcagcggtcaccgccatggtggccgggggactgatgccggcgttggcctgggcccaggcggccgatcccaagccgtggcagctgaacatgggcaagggggtgacccagacctcgcgcctggcctgggaatcgaacaatctctcgttgatcatctgcacggtgatcggcgtcatcgtgttcggcgcgatggcctacgccatcttcaagttccgcaaatccaagggggcagtcgccgccaccttcagccacaacaccaaggccgagatcatctggacggtgatcccggtgatcatcctgatcgtgatggcgtggccggccacggccaacctgatcaagatgtacgacacccgcgatgccgagatgacggtcaaggtcaccggctaccagtggatgtggaagtacgaatacctcggcgagaacgtcaccttcaccagccgcctggaccgcgagtccgaccgcgtgcggcaaagtggcatcgtgccgacccgtgaaagccatccgcactacctgctggatgtcgacaaccggctggtgctgccggtcgacaccaaggtgcgcttcgtcatcacctccgacgacgtgatccacgcctggtgggtgccggcgctgggctggaagcaggatgccattcccggcttcatcaacgaagcctggaccagcatcgagcagcctggcgtgtaccgcggccagtgcgccgagctgtgcggaaaggaccacggcttcatgccgatcgtggtcgaggcggtgtccaaggaggaattcaaacagtggctggcgcagcgcaagccggcgccggctgccgcgccggccacgcctgcggcacctgccgaaccggctgcaccggcgggcgaggcgccggctgcgcctgctgctgcagaagcggccagcgcacctgccactgcagccagcggcgcgtgatgtaaagcccgcggccgcccgcggccgtggtgacaaccgattctgagaggtgttttgcaatggcgcactcggcagttgggcacgacgatcaccatcaccagcagagtttcttcgagcgttggttcttctcgaccaaccacaaggacatcggcacgctgtacctgggtttcagcttcatcatgttcatcatcggcgcggcgatgagcgtggtgatccgcgccgagctggcacagcccggcctgcagttcgtcaagcccgagttcttcaaccagatgaccaccgtgcatgcgctggtgatgatcttcggtggcgtgatgccggccttcgtcggcctcgccaactggatgatcccgctgcagatcggcgcgccggacatggcgctgccgcgcatgaacaactggtcgttctggttgctgccggtggccttcagcctgctgctgctgaccctgttcctgcccggtggtgcgccggctggtggctggacgctgtatccgccgctgtcgctgcagggcggctacaacgtggccttcagcgtgttcgctatccacgtggccggcatcagttcgatcatgggtgcgatcaacatcatcgccaccgtgctgaacatgcgtgcgccgggcatcgacctgctgaaaatgccgatcttctgctgggcctggctgatcaccgcgttcctgctgatcgcggtgatgccggtgctggccggtgcggtgaccatgctgctgaccgacaagttcttcggcaccagcttcttcaacgccgccggtggcggtgacccggtgatgtaccagcacatcttctggttcttcgggcaccccgaggtctacatcatgatcctgcccgccttcggcgtggtcagcgagatcatcccgaccttcagccgcaagccgctgttcggctaccaagcgatggtgtacgccaccgcggcgatcgcgttcctgtcgttcatcgtctgggcccaccacatgttcaccgtgggcatgccgctgggcggcgagatctatttcatgttcgccaccatgctgatctcgatcccgaccggcgtgaaggtgttcaactgggtcagcaccatgtggcgtggctcgctgacgttcgaggcaccgatgctgtggtcggtggccttcgtcatcctgttcaccatcggtggcttctccggcctgatgctggccatcgtggccgccgacttccagtaccacgacacctacttcgtggtcgcgcacttccactacgtgctggtgaccggtgcggtgttcgcgctgatcgccgcggtgtactactggtggccgaagtggaccgggcgcatgtacagcgagaagtgggccaaggtgcacttctggtggtcgatcgtgttcgtcaacctgctgttcttcccgcagcacttcctcggcctggccggcatgccgcgccgcattcccgattacagcgtggcgtttgccgactggaacctgatcagctcgatcggtgcgttcggcatgttcgtcaccccgttcatgatggccgcgatcctgctgtcctcgctgcgcaacggcgagaaggccgaagcgcgttcctgggagggtgcacgcggcctggaatggacgctgccgtcgccggcaccggcgcacaccttcaccaccccgccgaccatccgcccgggggatctggcgcatgacgacatcacgcattgaggtggggcatgcataacgagagcccgctgcagacctgtagagccgagccatgctcggcggatgagaagcagccgaccagcggtcggctctacgagggcggaagcatcgagcagcagcgccagcgtgcgaagcgcacggcggtgtgggtcggcgccatcgctgtgctggtctacgtcggcttcatcctcagcggggtgatcggccgatgagcgaggcaccggccagcacaccgtcacgcagtgccgggctgccgcgcctgatcggcgtggcggtggcggtgttcctgctgacgttctcgctggtgccgctgtaccgcattgcctgcgagaaggtgttcggcgtgcgcctggaacgcggtcccggtggcgaagccagcgcaggtgccgcggccggcaagcgcaccgtgcgggtggagttcgatggcggcgtcaattcgcgactgccgtggtcgttccatcctgagcagctgaccatggacgtggtgcccggcgagctcaacgaggcgctgtacttcgcccgcaacgacagcgcagctgccgtggtcggcagcgcggtgccttcggtggcaccggcgcgtgcgtcgggcttcttcagcaagaccgagtgcttctgtttcaccgcgcagacgctgcaggccggcgagaagcgcgacatgccggtgcgcttcatcgtcgatccggacctgccgccggagatcaggacgatcaccttgtcctacaccttctaccgcaacgacgcgctgtccgatcggctggccccggccgccacctcggacggcgcgcacgccgcaccctgacccggataccgacatggcccagacaccgaccgacgccaacgtgtacttcgtcccggcccagagcaaatggccgttcgtgggttccatcgccatgatggtgaccatggtgggcgtggccagctggctcaacgatgccagctggggacgctggacgttctacatcggcatcgcgatgctggtgctgaccctgttctggtggttcagcgacgtggtgcgcgaatcgcaggccggcaactacaaccaccaggtcgacggatcattccggatggggatgatctggttcatcttctccgaggtgatgttcttcggcgcgttcttcggcgcgctgttctacacccgcaacctgggcctgtcgtggctcagtggcgaaggccgtggggtcatgaccaacgagctgctctggcagggctattccgccggatggccgaccaatggcccggcggcgatcggtggcgcgttccagaccatcccggcctggggcctgccactgatcaatacgctgatcctgttgacctccggcgtgaccctgaccatcgcccaccacgcactgaagtccggcaaccgccgccagctgctgatctggctgggcctgaccgtggtgctcggcctgggcttcctgaccctgcaggcagaggagtacatccatgcctacaaggaactgaacctgacgctcggctccggcatctacgggtcgacgttcttcatgttgaccggcttccacggcgcgcacgtgctgctgggcacgatcatgctgatcgtgatgtggctgcgttcggccaagggacacttcacccgcgacaaccatttcggtttcgaagccgccgcgtggtactggcacttcgtcgacgtggtgtggctgatgctgttcctgttcgtctacgtgctttgatcaggcgcgcatcggtggtctcagccgccgatgccgtgtggtttgatccagcccatgtagatgctcacgatcaccagcaggatcaacgctaccgacaccgcgatgcggcgcgtcagtgcattgaccgtgcgcttggtctggccgcggtcgaccagcaggtagtacaggccggcgcccagattccagacgatgacgatcagaaacgcgattaccagcagggtcttcagcgaatcactcatgcgcggctcgagggcagggtggatgtgcctatctgaccgcgtttgcgcggacttgtcatgatgcgccagcacacgcgcgtgttcggatggttgctggccgtgctggcgatggccggattcaccgcattggggctgtggcagctgcagcgcatgcatgccaaacaggcaatgttggatgcacagggtccagccgtggcacaggcgttgccgctgtcggaggccctggcggcgcccggcgcgttgcacggcgtggccgaccacggtcgcttcctgcccggcgtggtactgctggacaaccagatccggcatggccgcgctggcgtgaagatctatcgccccttccgcagtgacgacggcagcgtgctgctggtcgacctcggttggcgtgcgctgccgccggatcgcacgcttccggaggtgccgtcgccgccttcgccggtggccgtgcgcgggctgctcgcgccgccaccatcggcgggactgctactgggcccggcgttctctgctaccggtgaggccgggcgctggctggccagccggttgccggacgacgggctggcgcgcgcgctggggctgcaggcgctacccgaccgcgtgctgaggctggacccggcgctgccctttggcgacgagcgcgatctggacctgctgccgaacacgctgccgcctcagcgccacctgggctacgccgtgcagtggttcgggctggccctgaccgtgctggtggtggccgtggtgctggagcggcggcggaggcgcgtgattacccggtagtgccggccgctggccggcaacccccgcaatcctggatgccggccagcggccggcactaccggcatcccctacccaaccatgagaaaatgccccgcatgaacactgctacgtccccgcaggcgcgcggttccggccgccggaccctggtgctgctgtttgccgtgttcttcggggcgatggcactggccgccgtgctgcgcttctccggctggcagccgaccgggcaccgcaatgccggccagctgctgaagccgccggtggacctgcgccagcaggcgccgaccctggccagcggccagtcctacccctggaaccccgaggcccgtacctggcgcctgctggtggcgccggccggtacctgcgacgcgcagtgcgtcactttgtcgcagggactgggcaaggtgtggcagctgttcggccataacgccgataatgtcgagatcctgtggctgggtacgccaccggcgtcgatcgcctcgctgcccgcgctgcggccgctggctccgtcgccagccctgcgcgcggcgttgccgggcgtcgacgatccggcgggactgccggtctacgtgatcgatccgaacggcttcgtgatcatgcgccatgccccgggttccgacctcggtggcctgcgcaaggacatggccacgttgctgaaactgaagtgagtcccgtttgatgagcctttccgcgcgtccggcgctgcaccgcaatttccaccgcctggcgtggttcgccatgatcatgaccgcgagcacgatcatgttcggcgccttcgtgcgcctgtccgatgccggcctgagctgcccggactggccgacctgctatggccaggccacctggccgcagcacgtggaagagaccatcggccatccggcggcggagatccgcccgctggagacccacaaggcctggcgagaacaggtgcatcgcttcctggccggcgcgctgggcatcgagatcctgaccctggcgctgctggccacgcgcaagcgacgattcggaagcacggcggtggtgaccgcctgcgtgctggtggccgccggcataccgctgtacatgatgggctggcacggcaccgccagtgccctggccttgaccggcgaggcgatcctgctgatcgccgcgctgcgctggagcaacatcgatctcgcacgtgcggcgctgctgaccttggcggtggtgatcttccaggccctgctgggcatgtggacggtgaccctgctgctcaaacccatcgtggtgatgggccatctgctgggcggcatgctgatgttcggcctgctggtgtggatggcctggcgcgcgacgcacatgccgatcaccctggctgaagcgccgaagctgaagtggctgatgcgcatcggcgtggcggtgctggttacccagatcgcgctgggtggttgggtcagcgccaactacgccgcactcgcctgcggcggtggcagcgcctcgctggacaacttcccgcgctgcgccaaccagtggtggccgcagcacaacttcgtcgaaggcttcaccctgtggcgcggcatcggcgtggattacgaaggcggtgtgctggatggcgcttcgcgcatcgccatccagatggcgcaccgcctgttcgcggtggtggtggccgtctacctgctgtggcttggcgtgcgcctgttccggttgccgagcatgcgtggctgggccagcgcgctgatcgcgctgctggtgctgcaggtcacgctcggcatcctcaacgtgaagctggcgctgccgctggaagtggccgtggcccacaacggcgtggccgttgccctgttgttcgtactggtcagcctgctggcccgcctgcgtgccccggactgattccatgttttccaattaccgccagtactgggacctgaccaagcccaaggtcgtcgccctgatcgtctttaccgccctggtcggcatggtcctggccatccccggcgtgccgagctgggagcaggtgcgcgccggcctgctcggcttcctcggcatctggctggcggcctcggccgcggccgccatcaaccagctgctggacgcgcacatcgatgcgcagatggcgcgcacctcgtggcgcccgctggtggtgggcaaggtcaagccgtggcaggtgctggtgtttgccggcgtgctgatcgtgctgtcgatgaccctcctggtgctgtgggtgaacctgatcaccgcagtgctgaccttcgcctcgctgatcggctacgcggtgatctacaccgtgtacctcaagcgtgcgacctcgcagaacatcgtcatcggtggcctggccggcgcgatgccgccgatgctgggctgggccgcagtgaccggcatgcagggttcgtcggactgggcgtactcgtcgctgctggtgctgatcatcttcatctggaccccgccgcacttctgggcgctggcgatcttccgccgcgaggactacgcgaaggcggagatcccgatgctgccggtgacccacggcgtggtgcatacccgcaagcagatcatggtgtattcggtggtgctggcgctggtctgcctgctgccatacctggtgggcatgagtggtgcgttctacctgggcggcgcgatcgtgctcaacgccgtgttcctctggtacgcctggcgcatgctcgacccgccggatgagctgttctcgatgaagatgttctattactccatcgtctacctgatggcgctgttcgccttcctgctggtggaccactggatcctgccttggctgtgacctcggggtcggatccccgaaggggctctgaccccacctgatcgcgcggacatcctcgcatgacgtggatcaccttgaaccgctgtctcggcgtcgccattgctgttcctgaccccagggaaaggaagcagcagggatgcattcgttcttccgttggaccaccgcgctgatgctggcgctgggcatggccgtgaccgcgcatgccgacgacactaccgcgcagatccgccaatacgccgctggccatcgcatgctggtgctgggcgaattccacggcacacgcgagacgccactgctggtgcggcagctggtggacgactacagccgcaatggcgcgccggtcctgctggcgctggaactgccacgcgccgagaaccctgtgctgcgcgactatctggaatccgatggcggggccgcggcgcgccagcacctgcacggccgcgcgttctggaccgtacgcgacgaccagcacgatggtcgccgcagccgcgacatgctggcgatgatcgaaggcctgcgcgcgctgaaggcgcagggccgcgcgatcgaggtggttggctacgacgtcaatcacagtaacggcggcagccaggcccgcgatgaccgcatggccgccgaactacggcgcctgtaccagcgcctgcccgatggtgcacggatggttgtgctgaccggcaatgtccacgccatgctgcagcgccccgccgatgctccgccggaaatgcagacccagccgatggcatcggtactgcgcgacctggatatctacagcgtgcggctggaagcgttgcgcggccacttctggggatgcatggaccgctgcaaggcgctggcgctgctcgaacggcccgcgcgtgcgccggaggtcaacacccacgccggccgcgagtacgacctgtgggtgtggatgccgcagctgagcgtgggcacgctggtggagccgtgaatccacgcatggcgtggatctgctgtagatccacgccacgcgtggatggatttccgggtcagggcttgcgccgcgcataccgctgcgcgatcacaccgcagacgatcagctggatctggtggtagatcatcaccggcagcacgatggcgccgagactgccgccggcgaacagcaccttggcgatcggcacgccggtggccaggctcttcttcgagccgcagaacacgatggcgatctcgtcctcgcggttgaagcgcaggcgacgggcgatgaaggtgatcagcggcatggcgatgcccagcagcacagcggccacgatggccacagccagcagcgacagcagcggggtcttgctccacaggccttcggtcaccgcttcgccgaacgccgagtacaccaccagcaggatggtggcctggtcggtgtagcgcagcagcgcgcgctggcgttccacccagccggcaatccacggccgcagcaggtggccggccacgaacggcaccagcagctgcagcatgatgccgccgatcgcatgcagcggatcatggatgccacccgaggtgccggccagcgcggtcagcagcagcggggtcaggaacacgccgaggatgctcgacagcgaagcgctgcacaccgctgcgggcacgttgccatgcgccatcgaagtgaacgcgatggacgactgcacggtggagggcagggtgcacaggaacagcacgcccaggtacagctccggggtcagcagccagcccgacagcggcctgaacatcagccccagcagcgggaacaggatgaaggtgcaggccaggatggtcaggtgcagccgccagtgcagcatgccgccgatgatcgactcgcgcggcaggcgcgcgccatgcaggaagaacagcgcggcgatggcgacggtggtgacatcgtcgaggacgatggcggcggcgcccttcatcggcagcagcgaggccaggccgacggtgcacagcagggcgagggtgaagttgtccggtcgcaggcgcgaccaccagcgggtcatggtgggcagggtccttggtgcggagggttcagggcgaggtgaccggcgttgccaggcgttggcgggtggcggcttccagcgacttcaggccagcacgctggcccagctgaagggcctgttcggggctggcatgttcgtaccgtgcattgaccaggccgagcacggcgccggcgcggttgccggacgcacagtgcagcagcaccggcccctggctctgctgcagggccaggtgcacggcgcgcacgttggccgtatccaggccatcggcgccggccaccggaatgcgcacgtagcgcaggcccaatgattcggcgaggcgggtttcatcgaagccccggtcctcgccgggctggcgcaggtcgatcacagtgcgcacgccctgtgcagccaaggcctgcagctgtgcggcgctgggctggccgccggcatacaggccggggcggacttcgttgaggggcgcgtcttcggccaaggccgtcagtggcaggcagagcgacaacaacagcaggcaggtcaggcgcagcagcatggtcttctccgtggaaacgttctgccgctacaggcgcagtccggcgcgcgccttcagcagctcgcgcagctcgtacttgtcagtatcgtccaggccctgctggcgctgctttgccaacaattcctccagacgttgcaccagcagctgtttctccagctgtgccactgcgtcgtgcagttcctgggtccagctggcctcggtgccgggcagcgtctgtgcggccagggtatgcagcgagacctgttcctcgcgcccgtcgaagtgttccagcagggcgccggtactgatgtccgggcgctgttcgaccagccccagcagctccagcagcagttccacgccgggcaggcgcaggccctggaagtggtgcttgccgcccagcgtcagcgccagcgacggctgctgcagcagtacggcgatcgcgccgcgcaccaggctgcgcttggccacgggctggatcgtccgctgcggctggcgttgcggcatcggcgcgcgcgtggcctgggcagtaccgcccaggccggtcagctgcgccagctgctgcttcatcaggtcgccaaaggcgccgtcgggaatctgcgccagcatcggcttggcgcgttcggccaggcgtgccttgccatcgagcgtgcccaggttgatctcgcgggtcagttcgtcgaagaagaactgcgacagcggcgtagcctgcttcaggcgctcgttgaacgcttcggcgccttccttgcgcacgatggtgtccgggtcctcgccatcgggcaggaacaggaagaaggcctggcggccatccttcatgcgcggcagcaccgattccagcgccttccagccggcgcggcggccggcggcgtcgccgtcgaagcagaagaacacgtccggtgcgttgcggaacagcagctcggcatggtccggcgtggtcgcggtacccagggttgccaccgcctgggtgacgccgaactggaacagcgagaccacgtccatgtagccctcgaccacgatcaaccgctcgatcttctggttggcctggcgcacctgccacaggccgtacagttcgcggcccttgtggaacagcgcggtctcgggcgagttgaggtacttggggccgtcgtccttctcgaacacgcggccgccgaaggcgatcacccggccacggcggtcgaagatcgggaacatcacccggtcgcggaacttgtcgtagacgtggccgcggtcgttcttggagaacaggccggcgcggtcgagcagcttcatgcgccgctcgtccttgcccagcgcgtcgcgcaggccgctgtagccatccggcgcgtagccgatctggaagcgcgcgcggttctcttcgtccacgccacggccatccaggtagctgcgggccttctcgctgccctccagattcttctggaagaacttggtcgccgcgtccagcgccgagtacagctcgcggctgtcgtcctgctgctgcgggctgcgcggattctcgttgcgcggcacttccatgccggcgcgcttggccagttcatccaccgcgtcgaggaactcgaggcggtcgtagttcatcaggaagctgatcgcggtgccgtgcgcgccacagccgaagcagtgatagaactgcttggtgggcgagaccgtgaacgacgccgatcgctcgtcatggaacgggcagcgggcggcgtactccttgccctggcgcttcaacgacacgcggctgcccaccacctcgacgatgtcggtgcgggcgagcaggtcgtcgatgaaagcgtcggggatacgggccatgggcaacagggcagggcgcggtgcaggaccacgcgacggaaccgggggcggtcggcctagtttaccccctgtcgggcatctggctggcggttgccggatcaatgccggctgcggccaggtgatgacgcgcgcgcaggcgctcatcgatcaccgccgtcatcaatgcgccaacgaagaacacgacggtggcgtagtagatccagaccagcgagatcaccagcgcacccatcgagccgtaggcactgccgggggccacggtggcgatgtagacgccgatgccgtagcggcccagtgcgaacagtgccgaggtgatgacgccgccgatgaaggcctgccgccaggccacgcggcggtcgggcaggtagtggtacatgaaggcgaagccgactgcgtaaagcagcaggctcgtgacgtaccccagcgcgggcaggatcgatggcagctgggcgaaggccacctgcagtaccgtggtggccgtcatcgacaggatcagcaggaagcccagggccagcaccacgccgaacgagaacacgcgcttgcgcagccaggccttgaggccttccaggcgctcgccgctggtgcggaagatcaggttcagtgcgttctgcagttgggcgaacacggcggtggcgccgacgaacagcagcagcgtgctccacacacccgccagcgagccgacatccggctggttgtcggcgttcttcagaacggtttcggccacggtagccgcgctgctgccggccaccgagctgatctggtcgatcagcgcctgctgggccggtgggtacagcgaggcggtcagccacagcagcagcaccagcaacggtgccatcgacagcagggcgtagaaggagacggaagctgcctgggtcagcacgtcgacgtcgatgaagcgcttggccaccgccatcggaaagctgtcctgcaggcgcttgaggtacttgtgcagggacacgggaacgttgggctcgggttcaaccatgtgtgcggttgtagcaggcgaccgacgaaggtgcggtgaagcgggtgcatcaatggggtcagagcccttccgcgctgcggaagggatccgaccccaggtgctggattacgccagcagctgcttgaccagcttggagaccaggcccatgtcggcctggccggcgagcttgggcttcagcgcgcccatcagcttgcccatgtcggccgggccggcggcaccggtctcggcgatggcggcctggatggcggccacgatctcggcctcgcccatcttggccggcaggtaggcttcgatgaccacgatctcggcgcgctcgatctcggccaggtcttcgcggttggcggcttcgtactggctgaccgagtccttgcgctgcttgaccatcttgtcgagcacggcgatcacggcggtgtcgtccagctcgatgcgctcgtcgacttcgcgctgcttgatggcagcgttgatcaggcggatcacgcccagcttgtgcttctcgcccgccttcatggcggccttcatgtcttcggtgagctgctgcttcatgctcatgaggaacctcgtggtggtaggtggggcggggcggctgcccgaacccggaaacgcaaaaagccggcgacgctcgcgcgtgccggcttcggctccatcgcgacaggcaggcccgccgcaatgaagatgcgtccgatcagtacaggcgctgacgcttggtgacgtcgcgcgacgagcggcgcagctgacgcttcacagcagcggcggccttgcgcttgcgctcctgggtcggcttttcgtagaactcgcgcttgcgggtttcggccagcacaccggccttttcgcaagtgcgcttgaagcggcgaagagcaaactcgaagggctcgttctcgcggactttgacgctgggcatggaatctccgggacacagtagaaccgggtcacgcccggcgagccgcacattatagcggcgaaacgacaaactgcaagcggccaaccctgaatacgggccgggggttcgaaagcagtgagatctgcacgtcccccgagggggcggcaggggcgtcataatagcaggcatgcgagtccttggcatcgaatcttcctgtgatgagaccggcgtggcggtgtatgacaccgacctggccggcagcgcggccctgcgcgcccatgcggtctacagccagatcgccctgcacgccgaatacggtggtgtggtgcccgagctggccagccgcgaccatgtccgcaagctgctgccactggtacgccagaccctggccgacgccggcctgggcgtgggcgatatcgatggcgtggcctacaccgccggtcccggcctggtcggcgcgctgctggtgggcgctggcgtggcgcgttcgctggcctgggcgctggaggtgccggccgtgggcgtacaccatatggaaggccacctgctggccccgctgatggaagacgacccgccggaagcgccgttcgtggcgctgctggtgtccggtggccacacccagctggtggcggtggacgccatcggccagtaccgcttgctgggcgagaccctggacgacgcggccggcgaggccttcgacaagaccgccaagctgatgggcctgccgtacccgggcggcccgcagctggccaggctggccgagcagggcacgccgggcgcgtaccgcttcgcgcggccgatgaccgaccgcccggggctggatttcagcttctccggcctgaagacccaggtcctgatggcctggcgcgacagtgaccagagcgagcagacccgcgccgacatcgcccggggctttgaggacgcggtggtcgagaccctgtcgatcaagtgcgagcgcgcactggaagcggccggcaccaacgtgatcgtggtggccggcggcgtcggcgccaacacgcgcctgcgcgcccgcctgcagcagatggccgagcgcctcggcggccgtgcctgcttcccgcggccggcactgtgcaccgacaacggggcgatgatcgccttcgccggcgcgctgcgcctgcaggccggccagtacagcccgccgaaagtggatgtgaccccgcgctgggacatggcgaccctgccggcggtgtgaaccggtagcgtcgggcgacggccggcggacgcattaccgatgcactgccaacggcgacgccgccagcacggttgtcgcccgctcatggcgctgcagccagcccagcgtgtgtgggcagcgggcatggatcagccgcccgatcgcggccaggtcggcgccgatgtcacgttccaggaccggctcgtggtgggcgatgcggttgcgcaggtggcggatgcgtccgatatccgcatggatggctttcctgacggcactgggatgagcagagggagcatgctgcagaaccctgctgagtgcgggtatccaaagcgtggagtcgaagcgacaggtgaagagctgctgccagaacaccatcggcaggttggcgacgatcccgggtgtatcggttacgcggctggcaagttgttccagtaccgtgcgcggagaagtactggatgaggttggcagcctccgtcggaaggcaccattccagggccaacgcgggccatgctgcctggcgagcacagctgcagcggcgttgcgggtgaccacttcgcacagatggaccggcatcatcagtgcactgcacatccgcatgttccacaggtacagggattcggctgtgacgtcggggctgcagctcgatgcgattctctcgtaagtagacagacgctccgctgacaacgcgcgccgcagtacatcgtatggagccatcgtcatgtgcggtggtgaaggaggaatcgatgttcgcgagagtgggcggcggcgaccatcagggaacgtccttgtccgcgcggctgattttctgcgttttgcctcggacgaatacctgacctgtcctgtcggatttggccttgaccggcgatctggtccttgcctaatctgcgtgcctgcgccaccgggactcgcggctggatttcagctccccccggggacaaacggtagtaccaaagggccccgctagcagggccctttgttttttccgggccgccccacgctggtggcccaccgcccgttccgggcaggctcaccgccgtgccgttaccatggccgcctgtattcgtgccggtaagcgcaatggacaaggttttcatcgaggggctgacgatcgacgccctgatcggtatctacgattgggaacgacggatccgccaggacctggtgttcgacctggaaatgggtttcgacaaccgtcgccccgctgccaccgatgacatcgcccacaccctgaactacaaggcggtgagcaagcgcctggaacagttcgtgcgcgagtcggagttcggcctggtcgagaccctggccgagcgctgcgcgcagatcgtgctggacgaattcgacgtgaagtggctgcgcctgaagctgagcaagccgggcgcagtgcgcggcgcgcgcgcggtgggcgtgatcatcgaacgcacgcgggactgacccggtcgtgccggccgctggccgacaaccccggtcgtgccggccgctggctggcaaccttggcaacaacgaaacagacaggagacaactgatggtggacgcggtggtggcggtacagtggctggaacggctgcagaacacactggaaccctatcccggcgcctacctggcgttgatgatctcggcgctgctgatcgccgctggcctggccaactgggtgaccaagcgcatcctgctgcgcgggctgcggcggctgctgagccgccttccgggcgccgacactggccgcggcagccacctgatgcgggtgatctcgcgcctgtcgaacgtggtgcccagccaggtgatcgcctcgggcatccgcatcgtgccggacctgccgcctggcctggtcagcttcatcatcggcgcttgccaggcgtgggcgatcctgaccgtggtgctggccctctcgcatgcgctggatgcggccaatgatctctacgagcgccgccccgaggcccgcaacaagccgatcaaggggtacctgcaggtcgccaagatcgtcctcttcgtgatcgccggcctgtcgatcgtcgcaaccctggcgggggtcgatctgcgctacctggtcaccggcctgggcgcggccacggcggtgctgatgctgatcttccaggacaccatcctgtcgctggtggccagcgtgcagatcagtggcgatggccgcgtgcgcatcggcgactggatcgagatgcccagccagaatgccgacggtgacgtcatcgacatcgcgctgcacaccgtcaccgtgcagaacttcgacaagaccatcaccaccatcccgaccaagaagctggtgaccgagtcgttcaagaactggcgcggcatgcaggaggccggcgggcgccggatcaagcgcgcgctgcacctggaccagcacagcgtcggcttcctggacgagggtgacctggccttcctcggcgagttcgcgctgctgcgcgactacctgcgcgacaaggaacaggaactggggcagtggaacgggcgcctgcgcgagcagggcgtggccgaggtcaacagccgccgcgtgaccaacctgggtacgttccgggcctatgtggagcgctacctgcgcagccacccgggcatccataccgacatgaccctgctggtacggcagctgcagccgaccaccgagggcctgccgctggagctctactgcttcacccgcagcactgcctgggccgagtatgaggcggtgcagtcggacatcttcgaccacctgctggcgatcctgccggccttcggcctgcgggtattccaggcctccagtgacgccatgttgatggccgggcagcgccagttggccggctcggagtaagctgcggtgcccccggcggggccatacggaccccgctggtggctgaaactgaatgaagaaacctctcgccaaacggctcgggatcgctagaatgccgggcttgtaaacgttttcatcaaggactgccggtggcctccgatcgcatcgaatccctcattgcccagatgaccgtcgaggaaaaggtcggccagctgggtgtcttcgcggacatggtccgcccgttcgccccggacgtgaacccggaagccaacgtgcgcaatgccgaccaggtgctgcagcaggtgcgcgagggcaaggtcggctcgctgttcaatggtgtgggcgccgaactgggccgccgcatccagcaggtcgccaccgaggagagccgcctgggtatcccggtgatcctggcggccgacgtcatccacggcatgcgcaccgtgttcccgattccgctgggcgaggccgccagcttcgagccggacctggccgagcgcaccgcgcgcgccactgcgatcgaagccaccgccgcgggcctgcactggacctatgcgccggccgtggacatcgcccgcgaccagcgctggggccgtggcgccgaaggtgccggcgaggatgtggtgctgggctgtgcgttcgccgccgcccgcgtgcgtggcttccagggcagcgacctgcgtgcggccgattcgctgctggccacgcccaagcacttcgccgcctacggcgcggtgatggccggcatggaatacaacatggtggacatctcgccgcagaccctgcgcgacgtgcacctgccgccgttcaaggccgccttcgaggccggcgcgatcaccgtgatgtcctcgttcaatgacatcaatggcgtgccggccagtgccaatgccgaactgctgaccgacatcctgcgcggcgaatggaagttcccgggcgtggtgatctccgactacaccgccgacatggagctggtcgcgcacggctacgccgccgatgaccgcgatgccacggccaaggcgttcaccgccggcctggacctgagcatgcagagcggcttctatgccgagcacctgcccggcctggtcgagagcggcgaggtgccgatggcggtgctggatgaaggcgtgcgccgcatcctgtggctgaaggagaccatcggcctgttcgacgacccgtaccgttcgctggacccggcgcgcgaagcggatacctcgcacattgccgcgcatgacgaactgtcgcgcgatgccgcgcggcgttcgatcgtgctgctgaacaaccgtgacaacgtgctgccgctgcagaagaccgggcagaagatcgcgctgatcggcccgttcgtgcaggaccgcgagaacatcgaaggctgctggacgctgttcggcgacaagcagcgttacgtggacctggaaaccggcgtgcgtgccgccatcggcgacgaagcgctgctggaaatcgtgccgggctgcgaactggaagccgcgattccgggcggcacggaagccgctgtggctgccgcactgcgtgccgacgtggtggtgctggcgctgggcgaaccgcagcgctacagcggcgaagcacagtcgcgcgtggagatcaccctgccgccggcacagcaggcgctggccgaggccgtggcgatgaccggcaagccgctggtggtgctgctgcgcaatggccgcgcgctggcattgcagggcgcagtgcgcaatgcgcaggccgtggcggtgacctggtacctgggcacgcagaccggccatgccgtggccgatgtactgttcggcgactacagcccgtccggccgcctgccggtcagcttcccgcaggtgtccggccagcagccgtacttctacaaccacccgcgcaccggccgtccggaactgccgaccatgtcggagttcaaggcgcgctggcgcgagattcccaatgaaccgctgtacccgttcggccatggcatcggctacaccaccttcgcctacggcgtgccgcagctgagcacggcacagctcggctgggacgacaccctgaccatcaccaccgtgctgaccaacaccggccgcgtggcgggcgaggaagtggtgcagctgtacatccacgatcgcgtggccagccgcgtgcgtccggtgcgtgaactgaaggacttccgcaaggtggcgctgcagccgggcgagtcagccgaagtggtgttcaccttgacccgcgagcaactggccttcaccggccgcgacggcgtgctgcgtgccgagccgggccagttcgacctgtgggtctgtgcctcgtcggccgccggcgaagcggtgcagttcgagctgctgaaggcctgatcgaaaaaaaggggacggaggggattaagtcgtttgtgccaaaacgacttaatcccctccgtccccttttttgtggtcctcactgtggcggcgctaccatcgggcctcctgttcgatggagtgcgcgcatgcgccggatggcctacctgattcccgccctgctgctggcggcctgttcgcagccggcgccgccggccgagcctgcagcggatgcgccgccgccgatggaggccagtgctgcttcgacgcctgcggctgaaccggcggcgccggctgccgaagccgccgctgcacctgccgcaccggcagccgaggcggccgccgaggatgcgcgtgcgcgcatcgagtcgctgctcggcgatgccgcgcagttcgaaaaggtcttcaatgcgttcaaggccgccgtggtcggcggtgatcgcgctgcggtggtcgaggaagtgcgattccccttgaacatcagcggcggaaagaagatctccggccccggagagttccagcgcaactacgagaagatcatcacgccggaggtggtcaaggcggtgtccgcgcaggacttcggcaaggtgttcgtcaaccagcagggcgtgatgatcggcagcggccaggtgtggttgagcggccagtgcctggaccaggcctgcacgaagaccgaggtgaaggtcatcaccatccaatgaatgcagacggccccgcgtgcggggccgtttggcaagggtagtgccggccgctggccggcaaccgcaggatgccggaaggatccagggtgccggccagcggccggcactacctcaggccttcggcatgagcttcagcaggcgcgccttgctgccgtcttccagcagccacagcgcgccgtccgggccctgttccacttcgcggatgcgctcgcccatgttgaagcgctcggcttcgcgcgcgctgtcgccatcgaaggccacgcgcaccagcgaggtggacgacaggccaccgatgaagccgctgcccttccactgcgggaacaggctgccgctgtagatcacgaagccggccggcgagatcaccggcgtccaggtcaccttcggcgcggcgaattccgggcgcgtatcgtggtcgggaatcggccggccgtcgtaatggtcaccgttggaaacgatcgggtagccgtagttggcgccacgcacgatcaggttcagttcgtcgccgccggccgggcccatctcgtgcgcccacagcttgccgttggcatcgaaggccatgccgaggatgttgcggtggcccagcgaccagacctgtgcggccaccccgccctgcgacgcgaacggattgtcggcgggcaggctgccatcgtcgttgaggcggatgatcttgccgaggttgctgcccatgtcctgggccggatcgaacttctggcgctcgctggagctgatccacagcttgccgtccgggccgaaggcgaggcgatgcccgtagtgaccctcaccgctgaccttggggttctgccgccagatcaccttcaggtccttcagctggccaccgccgttggcatccagtgccagcgtggcccgggctacggcggcaccgcgggtatccagcgtgccttcctcggcatagctgacgtaaacgacatgattccgggcgaaatccgggtgcaggatgatgtcgccgaaaccaccctggccagcataggcgaccttcggaacgccggtgatctcgtgcttctggccgctggccgggtccaggtgctggagcttgccgcgcttttcggtgaccagcaggctgccgtcgggcaggaaggtcatcgcccagggctggtcgaagcggctgacttcggtggcggtgaacgggcgctggtcggtggcggcagaggccgccgtggcggtctgcgcaccgttggcggccggatcggcggcattgcaggcggaggtggcaaggatcggcacaaggccgagggcgagcagcaggggcgtgcgggtcatgggtatctccagtgcggggatgcggatggccgggctgtcccttgtataccaccggcaccgtgagcgtcgtggcccgaaggtcctgcgccccctgtgcgagcgcggcgggatcgtctagggtgggcacgcccgggcaaagcgtgcccgcctgcctgccaaggacctgcaatgaacactgccatgccccacaagccgtccaccgccttcatcgccgcctcctgggtggccctgctgctgggggcggcggcgtacctgatcggcctgttcaacgccacgatggcgctcaacgagaagggctactacctgaccctgctgctgttcggcctgttcgcggcggtgtcgctgcagaagagcgtgcgcgaccgcgtcgaaggcattccggtgagtggcctgtactatgcgctgtgctggttcgcgctgctgtcggcgctgatgctgctgctggtcggcctgtggaatgccacgctggcgccgagtgagaagggcttctatggcatggcgtatgcgctgtcgctgttcggcgcggtggcggtgcagaagaacacccgcgacctgatcgccgccggtgggggcgagagcaagcgcagcgcgatcgtgccgccgctgccggaacaggagtgatcgatccgatgtagagccgggccatgctcggctcagtcgagcgtggctcgacgttacagccgaggtgcgagagccgagcgtaggctcggctctacagaagcctggcgctatcgtgccagccgcggatccgccagctgtgcctcctcccagccacgacgcaccgcattgcgtgcctgcgcccagtccaggcggctgcggccgcgttcgttggcccagcgtgattcgagctcggcctcgacctgttcataggcgcggatcatgtcctgtgcacgcgcggcgtggccgatgcgataggccggctcgtagtcctcgaagaacagctggtcgtcgtagtacggctcggccgtgtagcgttcgcgccagtagttgctgatcgcgtcgcgcggcgtgctgtcgtccggtacgcggccggggatctggtactcggtcatggaaggctccgttgtggacgtagcccgatcgtgcctgtgtggcggttaacggcccggtccggcagcgtgatcaccagatcaatccgccgggcatggcccggcgctatcggtcatccggcatcggtatcttttcgcggcagcgtgtagatcaccgcgccgatggcgaacgccaccagcgcagcagcgatgttctgccagctggcactggcgaacagcgccaggcacagcagcagcgccagcaccggaatcaacggcccgccgggcagcttcaaggcgcccgggcggtcggcgtagcgcttggccagtaccaggactgctgcggcagtgccgatgtaggcgaacaggcgcgtcgtcatcgacagcagggccagctgcacgaacgaaccggacagggccaggccgagcgcgatcaggccctggcagaggatcgacgcggccggggtgtggaagcgtggatgcacctgggccaggatcttcgggccgtagccatcgcgggccagtgcgaacaggaagcgtgggcccatcatcatcgtgttgctgttggtaccgaggatggagatggtggcaccgacggtcaggatcagcgccagtgcttcgccaccgaaaccggcggcggcatcggccagcggggtggccgaactggacaggccggccagcgttccctgcgccaccacctgcaccgcgccgtagatgacggtgacggtgatgatcatggtgatcagggcgaacggaatatcgcggcgcggattgcggtactcgccggcggcggccgggatgttctcgaagcccgcgtaggcgtaaagcagcagcaaggcggcttcgcccatgcgctgcaggtcatgcgggtccgggcgttggccggagaaggccagctgtgggtcgatgtggaacgcaccgatggccacgaacagcagcagcggcagcatcttgccgatcaccagtaccacgccggtgcgcgcggccgagcgcacgccgatgatgttgatgccggtgaggaagcccagcgataccacgatcaccgcgatgcggcccaggccggcatcggcccacggccagaaacgcgcaaccgcgtcggccagcgcgttgctgagcgcagcggccgagctgatgcgggtcagccagatcatccagccgatctcgaaaccggcgaagcgcccgaacgcctcgcgtgcatacaggtagctgccgccgggttcatcgaagtagctggcggcctgcgcatagcacagcaccagcaaggccacgacgatgccggcggcgaccacgccccacaggctgaaggggccgagcagggcgacggtggcggccggcagcaggtagatgccgctgccgatcacatcgttgatcgacaggccgacgatctgccagcggctgaccgcgcgttgcagctgcggttcgtcctgcgtgctcaacggacgtctccggccagcgcgggcagttgccactgcgcctgcaggcgcttgtactccgcgcgcggcaggagcacgaaacgcggcgcgtcctgcggccgcagccagtccagcagtgcctgcatgcgttcctgcggcatggccgtgcagccggcggtggcctcgccgggctggcgccacagatgggcgaagatgcagctgcccttgccgggctggttgtccgggttgtgggcgatgacgaagccttcccggtagcgcaggtcgcccttgttgtgcaggtccagccgcatcggctcggtggagcccttgaccgctgcattgccgaccttcttttcatcgacgatgcggttgtagaacggcgaaccgggcacgtccatgcagtagctgctgtccagcatcggctggtagggcatggcagtgccgcggcgggtgacggcatagccgaacgcactgccgagcgcgaatatgccggccgggctgcggccatcgccttcctgcttctgcgggccatcggcctgcgccggatgcaggcccaggccccaggcgctgccggtgcggccaagcgccaccgggaacgcctggccatgcgggtgccagccctggccgtcgcgcacataggcctgcagttgcccctgggtgctgtcccagccttcgctggtgaccacgatcagctggcgcgcgccatccagcggcgccgcgtgaacggacaccgccgcggcgagcagcagtgcggtggtggcaaggcggaccagcgatctcatcaacatgcgctccggtcaggaatccagcaggtggtcgatccgctccaggttcaccgcaagctgctgctggcgatccggattggtgtggcagagcagcacgaacaggaaatcgagcagggcgtgcatggcgctacggtacagcagctgcgcgacctgtggcgtgcggtcgtgggcgcagaccgccagtgccgcatccgcatgcgcgcgcagcgggttggcggtgtggcgggtgatggaaatcaccttgccacccatgtcctggaactgtcgcgacaactgcgaaagctggggcaggttgccgaactcggagaacatcagcagcgcatcgccggggcgtgcggccgagaggtttgccagcatcaggatcggatcggtatgcggcaccaccagcagtccgagcagcgacagccgcatggcgaactcgcgggcgaacaggccgtcgtcacccaggccgtagacgaacagctttggtgcgccgtcgagcagctgcacgatgcgctcgatctccccgcgtggattggcctggcgtgtttcctcctcggcctgggccttgctgcggcgcagggcctcgcccaggcgctggtagtcatcgccgctgtcgggttcgtcgggcgcctgctgcggatcggcaccggcgcgggccacgtcctggccgatggagtacttcagatccgggtagcccttgaagccaagcttctggctgaacttcaccacgctggactggctgatgccgagcgcgctggccagctgctgtgaggagtagtcgcgcagcaggtgggcgttgtcgaggatgaagtcggcgatgcggcgctcgatggccgacatctgcccacgctcggtgcggatcttcagcaggggcggcatgcggggtgtccgggggtctgcaaaggcgttgcggttggccgcataaagcgaattatggggtgggtcgggcgggtggggattgcgggggacgccgcaagtacgtccgtgtaggcttggccgccgcatccatgcggcggacacccccgcaagccccacccgcccgaccttggacacatcgcgcgcgtgccagccgcgaagggattacggggtagggcaaaaacaagcgcttccacgcgtgacgtggatctactgggtgcagctgttgcattggacgttgagtccgccttgtagcgagccgagcaccgcaggtccggcgagggcgaagaggcgcgggtgtctgagcgcagcgagttcccgcgccgtccctcgacgggccgaggagcgcagggaaccggtgcgtagcaccggctcgcggccggcggagcgtttcttttggttacttttcttttcgcgaaaagaaaagtaacgcgcgacccaacgtcagtggcacgcaacgtcagccgcaaggcagaaatcaacccagcatctccagcccgcgcacttcggtgatgcccagccccggcacgtcgctgatgctgatctccgattcgttgaaatgcacgccgccgctgaccggatcgaactggcccagcgaggggccgtccagatcgaccttggtgatcacatcgctcttggccacggccaggtgcacggcggcggccacgctgatgctcgattcgatcatgcagccgatcatgcacggcacgccgtagatgccggcaatgtcggcgatgcggatcgcgttggacaggccgccggtcttcatcagcttgatgttgatgatgtcggccgcgcgctgctggatcaggtccatcacctggctcgggctgaacacgctctcgtcggccatcaccggcgtgttgacgcggtcggtgacgtacttcaggccgctgatgtcggccgctttcaccggctgctccagcagttcaagcaccacgccggcgtcttccagggtacgcatcgcatgcactgcctgcttggcggtccagccctggttggcgtccaggcgcagcagggcgcggccttccacggcggcatggatcgccttgacccgttcgatgtccaggccgatgtccttgccgaccttgatcttcaacgactcgaagccgcgttcgatcgccgacagcgagtcggccaccatcttgtcgatgtagtccacgctgatggtgatgtcggtggtgatcaccgggtcgccaccaccgagcatctggtacagcggggcgccgtgcagctgcgcccacaggtcgtacagcgcgatctccaccgccgccttggcgctggtgttgcgctccatcgcggtctgcaccagcgtgcacaggtggttgaggttgaccacgtcctggccgatcaggcgcggggcgatgaagtggcggatcgcttcgatgatcgagccgtgcgtatcgccggtgatcacggcggtggccggggcttcaccatagccggtgttgccggtgtcggtgcggatcagcacgaccacgtcttccacggtttccaccgtgcgcagggcggtcttgaacggtgtcttcaacggcacgcgcagcatgcccagttcgatggcggtgatcttcattcaggagtcttggcccgcaggcgctggatgttggtgatgcggtcgatgtagcggacggtatcgctggccatcatcggctccagcggcgtgaccgaaacaccattgagatgggcctgcacgcgcgtgccgtcggcaccgaaccagctgccgcccgccgtatcgtggatcacccacgtacgaccgtcgacgtggccgatggccatcatcacgtggccggggatgtagaccagatcgccgaccttcaggtcggtgacggcacggtcgcgcagtgccttgccgtccttgccggtgaacggcaggcgatccagcgccgggctgaccgcctgtgcactggtattgcgtggcagcagcacgccgaagctgcggtagatctcggagacgaaaccgctgcagtcgcgggtgtcgtagtcgtggccccaaccgtagcgctcgccgaggaacttgaaggcctgctgcagcaacaggcgcggggtcagggccaggtagtcggcggcggtgtcctgcgagcgcggcagcagggccggtaccagtttcaggcgaccatctgcctcgcgtaccggcagctgcaccacccacgatgcgtgcgcctgctggccgttcaccggttctgacgcgggccagtcggccagcaccggcaggcgcacgcccatgtccagctgcaggcgcgagacacgcggttcttccggggtgtaggcggtctgcgcggtggcaccggtgatgatccggtagggtcccttcgcgccgtagccgagcaccgtggccttgtcgccgctggcgatggcgtcggcttcgatccacgcgctgtagcgctcgctgtgcacgaacagccagcggccgtcggcactgcggtggaccacggcgaccttgtcgccggggaacagtgccgattcctggaagcggtcgatgtcggtgtcaccgacggtgctgaagacgcgctcgcgggtggggaaggtgcgcagtgcggcacgcttcaccaccagcccgtaggccggtgccacctgggcgggaatcgcatcaaggccgaggttggcttcgatcgcgctgcgcagggccggcgcgatgggcgtgcccttgtcgctgtagagggtgcgcgtgggccagctcgacagcgcggtgatgctggcacgcaccgtcgccccatcaagctgggctggcaacgccgcgatgtcctggatgtggctgtcctgcgcccgcatccgtgcgttctgtgcctcgatctgcgcgcgatccaggatcggcgcatcggcgttgtccagacgcgccgcccagtactgcggcgtcaggtaggcctcgtgcaggccgatcacatagggcagcggtgcgccgggatcgggcgccggggcggcctgtgcaaaggccggtgcggccagcaggcacagggccaaggtcaagcggcgcggccaatgccggtaccgttcgcgggaagccaggctcatgcggtgcacaccctcctcgaatgccttgtggaatatttattcctttcggcatcgaaagcaagaataaattattgaccggcatcccggcccgtgttacacagccgttaccacccgcgctggggaagtgtcgctgtggatcctgccattcgcaaaccgcgtctgcctgctgctgccggcctgtgtgccgcgctgctgctgtgggtgtcggtcacgcaggcggcagacgggcgcagcagccagcagcgtgcgcgccaggcgcaggtgatcgacctgatcgacggcggccgcttcagcgacgccgatgcgttgctggcgacagggagcgatgctgccgaaggcgcgttccagcgtgagcgcatgcgccgcatccgcctggatctttccctcgacgaaaccgccgccaagtctgccgtgcgccgctggattcccgacctgaccgacgaggaattcgcgcgctgggaccagcttggcctgatcgagcatctcgatatcgatggcgagcgttggtacttcaagcgcgcaccgtcgaatctgttcctgctcagcgacgaagcacgcgcacgccgccgtgcggatgcgccgatgccgcctccggggcccaacgaagtgctcaacgcgcaccacacgcgcgtgcttgccgcggccgaacagagtggccgggcgtcggtgctgccgcagcgtatcgaattcacccaatcgctcacggtgaaggccgatgccgtgccggccggcgaaaccgtgcgtgcctggattccgtacccacgcgagatccccggccagcaggagcaggtgcagtggctgggcagcagcccaggcaaggcgcgggtggcaccggccagcaccttgcaacgcacggcctatctggaggccaaagcggtggccgggcagccgacccgcttcgagatccgctacgcggtcacgatcttcgcccggcataccgcgatcgacccggccgtggtgcaacccaccccggccgatacggcgttgaagccgtatctggccgagcagctgccgcatgtgcgcttcacccctgcgttgaagctgttctccgaccaggtgctgcagggcgagacgcgcccatatgaagtggtgcgcaagctgtttgctgcggtcgaccgtattccctgggccggtgcgcgcgaatattccacgctcagcaacatcagcgattacgcgctgcgttccggccatgccgattgcgggcagcagaccctgctgctgatcgcgctgctgcgcctgaatggcgttcccgcgcgctggcagtcgggcatggtgttctccgacgatggcagtggctacaacaacctgcatgactggggacaggtctacctggcgccgtatggctggctgccgatggacgtgaccaccggcgcactggccagcgatgtgccggccctgcgcaacttctacctgggtggcctcgatggctaccgcatcgccttcaacgatgatttcggccagcccctcgtgccggccaagcagcacttccgctcggaaacggtcgactcgcagcgcggcgaggccgagtgggcaggcggcaacctgtacttcgaccaatggagctacgacttccagtggcgggtactgccagccaggcaacgctagcgcgacacatcgcattccacaccattcaattcttgcaggagagagcaggggatgaaggcttacagcatcaagcgggcggcgttgtgcgtcgctctcggggcgtgtctgggcgtgatcgcgcccagcgcattcgcacaggatggttcagtggtcggccggctggtcagcgatgccggccaggtaccggccggtgccacggtgaccgtacgcaacccggcaacgggcttcgtgcgctccgtgcaggccgaagccaacggcagctaccgcattccgctgctgccggtcggcacctatgagatggaggtgagcctgcccggcggaggggccagccgtgtcggccaggtgacggtcagtctcggcagcgcgaccacggtgaacgtgccgctgggtgcggtcagtaccctgggcacggtcgaagtgcgggcgccgcaggtggtgtcgatggtggatgtgaagtccaccgagtcggccaccaacatcacccgcgaggaactgtcgcgcctgccagtggaccgtgacatcaccgcggtggcgctgctcgcgccgggcgcggtgaagggcaaggggtcgctgggcgggcagggcatttccttcggcggttcgtcggtggccgagaacaccgtctacatcaatggcctgaacgtcaccgacttctacaaccgggtcggcttctcgtcggtgccgttctcgttctaccaggaattccaggtcaagacgggcggctactcggtggagttcgggcgcagcaccggcggcgtcatcaatgcggtgacccgctcgggcagcaacgatttcaaggccggtgccgaactggtgttcgagccgcgcgcgtggcagtcgcaggcacgcgaccgctacgacggcagcggcagccgctacatcaccgccagccgcgacgactacagccgcagcgcgctgaatgtgttcgcttccggtgcgctggtgcaggaccgcctgttcttcttcggcatgtacgaggcgcgcgactaccgtcccacctcgaccaatgatgccggcacgcgcctgagccagggcaaggccgatgatccgttctggggcggcaagatcgattggcagatcaccgacaaccagatgctgtcgctgttcggcttctcggacaagagcaagaccctcaccgacgtctacgcttacgactacgccacggggcagaccgtgggcgagcgcagcaaccagatctacaacacggtgggtggcaagaactggtccggtacctacagctggcaggtcaacaacgacctgaccatgaagctgatgtacggcgagaacaagcgcaaccgtgtgcagagctcgttgatggaccagaactgcaaccgcgtgttcgacaaccgcacggccggccagggcgtgccgccgtcgctgcagggcgaccgcagctgcaccagcagctcgcagctggagtcggcgctggacacgcgcaaggccgcgcgcgcggacttcgaatggacgttgggcaaccacctgctgcggttcggcctggatcgggaagagaacacctccgattacagccgcgcctatccgggcccgggcggcttccgctacgacatctactaccgcactcccggcagctcgctgaacggtggcgtggtgccggccagcggcgtggtcgtgcgcacccgtcgctatgaagtggacggggccttcgagacgatcaactcggcctactacctggaagacaactggcaggtgacgccgaatctgctgctgaacatgggcctgcgcctggaagccttcgacaacaagggcggcgacggcagcagctacatcaagatcgacgacatgctggccccgcgcctgggcttctcctgggacgtgcgcggcgatggcacgaccaaggtgttcggcaacctgggccgatacttcctgccggtggctaacgtcatcaacatcaagcaggccggtggtttcctcgacgagcgcacctggtacgagttcctcggctacaccggcgcagccaacaacatccccaacctgggcgcgcagatcggcccagtggacaactcgcagggcgacggcagcgtgccggacctgcgcgcggaagtgaaccgggacatggacccggtctaccaggatgaagcgatcctgggcttccagcagatgatcaacgaggcctggtcggtaggcgccagcgtgacctaccggcgcctgcacaatgccatcgatgacatgaacatcaccgcgaccggccagtgtggtgccgtcgacagcgtgtggatcatgggcaacccggggcgcaccaacaccgtgtggggtgacaccgactgcgacggccgcaacgatggctggatcagcatcgacacctcgaaggaaggttgggcgctgtatgacgacaacggcaattatgtcggccagcgcggctgggtgaagcccaagcgtgactacaaggcgctggaactgcaggtcgaccgcgcctgggacggcaagtggggcttcaacgcctcctacacccttgcatacggtcgcggcaacgcagagggcccggtcaactccgataccgacttcgccgatgcagggcgcaccgagaacttcgacaatccgtgggtgaactacgggggctatggctacctggccaatgatcgccgccaccagttcaagttccgtggcagctacgcgctgaccgagaacctcagtgtggcggccacgctgggcgtgcagtcgggcagcccgattacccgcttcggcgccggcaatccgttcgacgacaccgacttccacagctactacgtgtgcgtgtccaactgccaggcgacggttccgtcccagcgcgtgttcgtgcattcgccacgcggtggcgatggccgcacgccctggacctatgacctggacgtgagcgtctcgtacaaggtgccgattcccaccgatctgcgcctgaagctggcggtgtacaacgtgctcaaccagcagcgcgtggtgaccgtggaccaggactacgagccgcaggacagcatcggcacgccgaacccgctgtaccgctacggcaccggcttccagtcaccgcgctatgcgcagttgaccgtgacatgggcctactgaagcccgcacggcaggctcgaaactgcgtctgcgcggcggcgctggcggtgttcccggttgcggtggcacagaccaccgcgaccgcctccctcgatgccgatgtcgctgccgtcgtccagctcgagcacctgcccgggctggcgatggcggtggtcgacaacgggcaggtggtctatcgccacgccgagggcgcgcgtggcgatggcggccgcatcgacgaggacacgctgttcaagatcgcctccaacagcaaggcgatgactgctgcactgctggcgcggctggtgcagcagggcaggctgcgctgggatgatccggtgcagcggcatctgccgggcttccgcatgcacgatgcgtgggtgggccagcagatgcaggtgcgcgacctgctgatccacaacagcggcctgggcttgggcgccggggacctgatgctgtggccggagccgaacgcgttcacccgcgccgacatcatcgccggattggcgcacctgaagccggtcagcagcttccgcagccactatgcctacgacaatctgatgtacgtggtggccggtgaagtggccgctgcggcgggcggcaagccgtatgaccagctgatgcgcgagcaggtgttcgaaccactgggcatgacgcgctgccaggtgggggcgtggtcggtgaaacgcgtgggcaacgtagcgcagccgcatgcctggcgtggcgaacgcaatgatgtggtgaacgccgatggtggaaccagcccggacctgccgtcgatggcggccggcggcatccgttgttcgttgcgcgacatgacgcgctggatgcaggtgctgctcgatcccaccctggcgcccggctggctggacacggagcagcgccgcacgctgtggaccctgcacatgccgatgccgctgggcgagcgccagcggcgctgggacaatgcgcatttctacggctacggctatggctggcgcgtgtctgacatggacggccagtggaaggtggcgcacaccggcacgttgtcgggcatgtactcgtcgctggcgctgctgcctgatcgccgggtgggcgtggtgatgctgatcaacggcgaaggcgaggacgcacgcatggccctgatgcaggccgcgctgaagcgcttcaccgcagcggacgatgcgcgtccggcgatggactacctggccgaactgaaggctgaccaggcaacgcgggccgcgaccggccattcgcggccatccaccgcggcggcgcaggagacgagccgcacggacctgtcccgctggcagggccgctaccgcgatccgtggctgggcgcggcctcgctctgcccgggcaaggacggcctgcgtttcagcgtggacaagtcgcccaggctgcaggccacggtgctgcagctgcaggggcgctggctgctgcgctgggatacgctgggcgacgaggcgcaggcgtggctgcagccgggcgaagccccggcaccgacgctggacctgcgcgccatcgacccggacatcgacttcagctatgacttccaggacctgcatttcactcgtactggcgactgcgctggcggcgaccacccgcgccgctgagccaccgcgcgtttcaccggcagccgacgcggccagcgccggactggtggagatccgcacgttgtcgccgcgcatcgacctggatatccgctatgccggtgccaacaacttcaccggtgcgcgcgtgcccggctacgaggcgccatcgtgttatctgctggcgccggtggcgaaggcgctggcacaggtggaacaggacctgcgcggcgatggcttcggcctgcggctctacgactgctaccggccggtgcgttcggtgcaggcgttcatggcctgggtgaacgatccgcgcgagcgctcgcgcaaggcacagcagtacccggacctggacaaaccacggttgctggccgacggctacatcgccgagcgctccggccatagccgcggtgccacggttgatctgggcctgctggattgccgcagcggtgcatgcacgccgctggacatgggcaccgacttcgatttcttcggtccacgcgcgcatacgcaggcaagcggattgagcgatgcgcaacaggccaatcgccagcagctggtgcgcgcgatggcgcggcggggcttcgtcaactatccgcaggagtggtggcactacaccctgcagcccgaaccggatcccggcaccgcgtacgacgtcccggtacggtaggggcatcggcagggcaccgccccgcctctgacagtttcccgcgtggtccgttgtagagccgagcccatgctcggctgctccttgttcaatcgtcgagatattcgatttggatggagattcatccacgcatggcgtggatccactgtggctgccgattgggtccggcgcagatcccttacactggccgcctcttcatccctgcccacccgatgaaccttcccctgcacttcggcctgctcggcaccctggaagccggcgccatcgccctgctggtcgggctgctggtgtacttcgtgtggtcgcggctgtgccggctgctgcactggtcggtgggacatgcgatcggctggtcctgcatcatctcggtggtggcctccgctggcatcgatgcgtggaagctgttctacatgggtatcgtgcgactggagtcgccgctgtacgcgcgcctgttcctggccaccatccacgatccgaacgagctcggcagccgtgtcgtgctggaaatcgccggcgcgctcgccggtgtcgccttgggatgggtgttgttcagttcgcggtcattggaaaaaaccgtcgactgacgcaggtttttcgttgcctgccggttaaatgcagaggcgctgaatgcgcatcttatgagctgctcactcctcgctaaccagcgcgctaaagcatgcgtggatgcgagtggttaatcgtgcgtgtggaggccggtcgcggcccaaaatcgattcagaaacgcggtggcagggtaggtgccgtgcggaaacaacaggccgcgcaacaccacccaatatgcaggagacacccctgatgactattcgcaaccgcaagcccctgatcgccctgatcgtcgccgccggcagcgtgctggccattccggcgatggcccagtcggccaagcagcaggccgcacatgcgcagaatgaagcggcgcaggcccagcaggcggcagcacaggccgggcaggcggctgaccaggcgaccgatgcggccgcagcggcctcggcgcaggccaacggtggtggccagacctgggccagcatcgataccgatggcaacggcaccatcagcaagaccgaggcgcaggtgaacgctggcctggcccaggtgttcgaccaggccgataccaacaaggacggcgagctgagcgccgacgagtacaaggcctacgtggccgcgcagcaggccggtgcgggtgccggcgcggcgcagggccgctgatccagacctgattcgggaagaccggtgcatgggggcccgggcggctgcggccgcccgggtttttctcgtcatcgccacccctgtatccttggccgatgaacacgtccacgcccgcgccgtcgcgcgccatcggcctggtcggttttgacggtgacgacacgctgtggaagagcgaggactactaccgcaaggccgagcaggattaccttgacctgctgtcgcgctatgtcgacgtgcacgacacccagaccgcgcgccacctgctggaagttcagcagcgccacctgggcaccttcggctacggcgtgaagagcatgaccctgtcgatgatcgaagcggccatcgacatcaccggccagcgcatcgaggccaaggacatccagcgcattctggatatcggccacgataccctgcgccacccggtggaactgatcgacggtgtgcgcgaagccgtggcggccatcgccgagcactacccggtagtgctgatcaccaagggcgatctgttccaccaggaagcgaagatcaaggtcgccaacctggccgagctgttcccgcgcatcgagatcgtttccgagaaggacccggaaacctacgcccgcgtgctggccgaattcgaactgccgatgcagcgcttcgtgatggtcggcaactcgctgcgctcggacatcgagccggtggtgaccctgggtggctggggcgtgcataccccgtacgcggtgacctgggcccatgagacccagcacggcgtggccgacgacgaaccgcggatggtcaccgccgataccgcccacgactggccggccgcactggcggcgatcgaggccaaggccgctgcggcggcctgacagggcccggcagctgcggcagaatcgtggcatgaacgttcgactgcgcgcgctgttgttgtccctgctgctggtgccggccaccgtgccggcccagcagaccgccgagcgttcggcggcgtacaccgtggaaaccggtgaccgctggatcgatgcccagttgcaggacatcaaccattacgccgaacgctaccccgatgccttcctcgatgaagtgtcgcgctacgcctatgtcccccgcggctacatcaatgcgctgttcaccacccatggctggcaggccggggatatctatttcgcctgcttctgggccaaggccagcggccagacctgccgcgacagcgtgcgcgccttcagccaggacccggagggcggctgggaagcggtggtgaagcgcatgccggccaagccggacaacctgcattaccgcgctgtgcggcatgccatcgtggccagctaccagcactgggaccggccgatcaccctggatgccaccctgaagcgccagttgaagcggtagtgccggccgttggccggcaactgcacccttccaggcatcaggaggttgccggccagcggccggcactacccggccatgttgctctgcgtatcgcggccgccgcgcgctccggcgacaatacgggtccgagctgttccccgttcccgtaatcgagtgactgatgagcgcctctttcgtttcgcctgatgtgatccgccgcctgttcgcgcaggccatgtcccgcatgtaccgcaccgaagtgccgctgtacggcacgctggtggaactggtggagcggatcaacgcgcaggtgcttgcccaggacccggcactggccgcgcagctgcagcgcaacgacgagcgtgcgcgcctggacgaagagcgccatggcgcgatccgcgtcggcaccgcgcaggagctggcgacgctgcgccgcctgttcgcggtgatgggcatgtacccggtcggctactacgacctgtcggtagccggcgtgcccgtgcactccaccgcgttccgcccgctgaccggcgccgcgctggcgcagaatccgttccgcgtgttcacctcgctgctgcgcctggagctgatcgaagacgaaaccctgcgtgccgagtcggcgaagatcctggcacgccgccgcatcttcaccgacggcgcactggcgctgatcgaccaggccgagcgtgacggtggcctgtcgcaggccgacgccgagcgcttcgtcgacgaagcattggaaaccttccgctggcacggcgatgccacggtcgatctgccgacctaccacgcgctgcacaatgcgcaccgcctggtggccgacgtggtcagtttccgtggcccgcacatcaaccacctgaccccgcgcacgctggacatcgacgcagcgcaggcggcaatgatcgagcacggcatggcggccaaggcggtgatcgaagggccaccgcgccgcgcctgcccgatcctgctgcgccagaccagcttcaaggcgctggaagaggccgtgcatttcccggatgcggacggtggcgatgccggcacccataccgcgcgcttcggcgagatcgaacaacgcggccttgcgctcaccccgaagggccgcgcgctgtacgaccagctgctgtcgcaggcacgcgatgccggtggcgaaggcagtaccggtggcgactacgggcagcgcctgcaggcggtgttcgccagcttcccggatgaccatgacacgctgcgccaggaaggattgggctactaccgctaccagctgaccgacgccggccgcgccgcgccggaacgcgtggccgatctgcctgccgaagtgctggtggccgccggcctggccacggccgatccgatcgtctacgaggatttcctgccggtcagtgccgcgggcatcttccagtcgaacctgggcggcgaagaacagcgcgcgtatgccgcgcacgccaaccgcgaggctttcgagcaggcgctgggcgtggcggtgaatgacgagttcgagatctacgagcggctgcaggctgagtcgctggcggcgctgcgcaccgcgtgaaggtagagccggccgctggccgggcgcaccacgtgaggtagagccggccgctggccggctgtaggggaagccggccagcggccggctctacccgatgtccggacctggggtcagcccttcatcgtgcccgtatccagccagcgctggtgccacgacagtgcttcgggcaacaggtgcggggtgtgcttgccgtagctttcgcggctggcacggtcgaagtaatcctgcagctgcgggcggaaatccgggtgcgcgcagttgtcgatcagcacctgcgcgcgcttgcgcggggtcaggccacgcaggtcggccaggccctgttcggtgacgatcaccgacacgtcgtgctcggtgtggtcgacatggctggccatcggcacgatcgccgagatggtgccgttcttggcagtggacgggctcaggaacgccgacaggaaaccgttgcgggcgaagtcacccgaaccgccaatgccgttcatgatccgcgtgcccatcacgtgcgtcgagttgacgttgccgtagatgtccacctcgatcatgccgttcatgccgatgcagcccaggcggcgcaccagttccggatggttggagatctcctgcgtgcgcatgatgatgcgctcgcggtagaaatcgatgttctccttgaacgtctcgttggcctgcgggctcagcgcgaagccggtacacgaggcgtagctcagcacgccatcgcgcagcaggtcgagcatgccgtcctggatcacttcggtgaacgcggccaggtcgcggaaaccgctcctggccaggccggccagcacggcgttggggatgttgcccacgcccgactgcagcggcagcaggttcggcggcaggcggcccttcttcacctcgtgcttgaggaactcgatcaggtgcgaggcgatctgttcgctggtcgcatcggtcggactgaacgggctgttgcggtccgggccgttggtgcgcaccacggccacgatcttgtccgggtcgcagcgcagcgcggtgtcgccgatgcggtcgttggcgttcaccagcggaatcggcttgcggtgcggtggcagcgcggtgccgtagtagatgtcgtgcatgccgtcgacgccggccggctgccattcgttgacctcgacgatcaccttcttggccaggtccagccaggtcttgttgttgccgaccgaggtggagggcaccagcgcgccatcttcgcggatggccgagacttcgatcacggcggtatcgatctcgccgtagaagccgaaccacacgtgctgggcgacgtggctgaggtggatgtcgatgtaatccagcttgccctcgttgatgcggttgcgcgcatccggatcgctctggaacggcatgcgcatggcgatgccatcggccttggccagcgcgccatcgagttccggcgcggtggaggcgccggtcatcagcttgatctggaagggctggccctgggcgtgcaccgcttcgatgcggcgggccagttccacgggaacggccttgggatacccggagccggtaaagccgctcatggccacggtttcaccgggctggatcagcgcggctgcggcctcggcggagaccacgcggtcacgaagacgcgcgttggcgatgcgatcaacagacatgacgacagtgtttctggggggaaagccgattatcggccatccttatccgtacggggggttctaccttcgtggaatggcttttccccaccggggtcacccatacccaccggttttgttttgcagtgcagcgtgcaaagtgctttcgcagcccgcacgatggccctgcatcccgacgtgggggagggagcagagcccgctggcagttcgctgcaagcgggcttttttattgcctgccgcccagaatgaatgcgcggcaccccttcagggtcggatccttttgccaagggcaaaaggctctgaccccacccgcggcatcaagcggcggcatctcgggggcagagcccttcgccgttggcaaagggatccgaccccgcgagaatcagcgcatgaccctcgccaccgctgacctgcccgccaccctgcagccccttgtcgaccgcgccctggcgcgcctggcccaggtcctgcccgagtctgttcctgccgagctgctgccgctgctgacccggctggcggtggccagcgacttcgcgctggacaccctggtgcggcaaccggcgctgctggcgcagctggccgccccgactgcccgccgatcccgacgccggtgctcgatccgctgcaacccagcgactggccggcacagctgcggcgctggcgcaccgcgatgtccacgcggctgatctggcgtgacctggccgggctggacgacgtggcgcagactctggctggcgccaccaccctggccgaggattgcctgcggctggcgctggatgccctgcagcaggaattcacacagcggcacggcgtggtccgtgatggcgcaggcgtcccccaacagctggtggtattcggcctgggcaagctcggcggtggcgagctcaacttcagttccgatatcgacctggtctatgcgtacccgcagggcggcgaatccgacggtccgcgcgcgctggccgccgaggagtatttcgcccgcctcggccagcgcctggccaagctgctggacgaaaccacggtcgatggcttcagccaccgcgtcgacctgcgcctgcgcccgttcggcagcgccggtcgcgtcgcgctgtcgttcgcggcgatggatcagtacttccagcgcgaaggccgcgactgggagcgctatgcgtggctgaaggcgcgcgcggtggccggcgatatcgacgccggcgaagcgtggttgcagaccctgcgcccattcgtataccgccgctacctggatttcaccgcgctcgacggcctgcgtgagatgaaggcggcgatcaccgccgaagtcgcgcgccgcgagctgcacgaagacatcaagcgcggcgccggtggcatccgcgaaatcgagttcctgtgccaggcgctgcagctgatccgcggtggccgtgagccggcgctgcgcgagcgccgcctgctggtggcactggacgcgctggtggccgccggacagattgcgcccgacgatggcgctgcgctgcgcgaggcctacctgttcctgcgccggttggagaaccgcctgcagatgctgcgcgacgcgcagacccacgtgctgcccagcgacgcgctggaccgcgcgcgcatcgccatcggcctcggctacccggattgggaggtactgcgcgcggcactggccgaacagcagcagcgggtcagcaccgaattcgccgcgctgctggccccgcgcaagggccaggccgcgcccgacgcgctggccaactactggcgcagcctgcccgagggcagcaacgcgccgttgctggccgaagccggtttcctcgatgccaatggcgccgaccagtcgctgcgcgatttcgcccagggcaccggcgtgaagtcattgtccgatgcggcgcgtgcgcggctggatcgcgtactgcccgcgttgctgcatgcggccacgcgttcgccgcagcccgatgccgcgctcaagcgcgtgctcggcctgctgcaggcggtgctgcgccggaccagctatctggcgctgctggacgaacaaccgagcgcgttggcgcgtctggtcgatgtgctggcgcgcagcgcgctgctggccgagcggctcgccgcgtacccgctgttgctggacgaactgctggacgtgcgcgtgtccggaccgatgcccgatgcggccggcatgctggccgagtgccagcaggtgctggcggtggaagatcccgaatcggcactgcgctggctcaacgagacgcggctggcgctcagtttccgcatggcgatggccacgctggacggccgccagggcgcggtggacagcacgcggcaactggccgaactggcgcaggcggtggtggtcaccgtgctggcgatggccgaggcggacatgcgcgccgcgcacggcgcgattcccggtggacgtttcgcgatcatcggctacggcagcctcggcgggcttgaactgggcttcggttccgacctggacctggtattcctgcacgacaacccggccggcgtggaggccagcgacggcgcgcgtccgctggagccggggcgctggtatgcgcggctggcgcagaaggtgatggcgctgctcggtgcggtcaccgccgccggccgcctgtacgacatcgacgtgcgcctgcgcccggatggcggcaaggggtcgctggtgtcttcgctggccagctacaccgagtaccagcgcgaacgtgcgtggacctgggaacaccaggcgctggtgcgcgcgcgtggcgtggccggcgatgccagcctgctggccgatttcgagcaggtgcgtgcacagacgctggggcgtgagcgcgacatgggtgtgctgtatgccgacgtgctgaagatgcgtgggcgcatgcgcaccgaactggaccgcagcgacgccgcacggctggacctgaagcagggtgctggcggcgtggtggacctggaattcctactgcagaccggtgtgctggcgcgcagtgcgcggcacgtggcgttgctgcagccgcgcgatacgccgtcgttgatcgatgcgttggctggtgctggtttcctgccggatgccactgcgcaggcgctgcatggcgcgcacgccacgctgttggacgtgggcctggcctgcacgctggaccgccgcccgcggctggccccgaccacgccggcgattgaagaggcgtgtgcagcgattgcggcggcgtgcagagcggcagagctgccgttcgcctgagtgccggatggcggaggactgcagttggtagatgccaaccttggttggcatgaatgccaagcgccaaccaaggttggcgactaccgcatcaatggccctgcgatgcccgctcctggtgggtgccgaccgttggtcggcacaatctgtcggcacccaccggatcaatggcccttcgatggcacgccgttggtagatgccaaccttggttggcatgaatgccaagcgccaaccaaggttggcgactaccagatcaatggccctgcgatggcccgctcctggtaggtgccgaccgttggtcggcacaatctgtcggcagcgatgagttctgcagggcgtgtcgaccaacggtcggcacccaccggatcaatggcggtcagctggtggcgcgcaacggcgccatcttccacaacaacgcgcggaacggggccagcaggcagacaccgatcgccagcttcactgccaggtcgccggcggcccagctcacccacggcaaggtggaaccggcaaacgcgatcgaccagaaaagggtggtatctaccgtcgcgctgcaggtggtggcaaccatcggtgcgcgccaccagctgccgcggcgcaggcggtcgaacacggtgatgtccagcagctgggccacgatgaacgccgagcacgaggcaatggcgatgcgcggggtggccacccagatcgacagcagcaccgccaccgcgaagccgatccacgccacgcggcgcgccgggcccgggccgaagcggcggttgatcaggttgctgaccaggaacgcgaccggatagctgaaggcgccccaggtcagccagtcgttgatcgggtactgcaccagcacgttggacagcagcaccactgcacccatggccagtaccgccagcaccagggcgcgcggggtcagcggggcaaacagaggggcaggacgcacggacatggcgagccagggggacaaaggggatcgcccattatccgcccggcctgcggcaaagccaaaaccggtcgttcagctttacagcgcttcactcatcacatcaccggcggcataggccgtcggcacataggccagggtctggccctgcgcgctcttcacgttccagccggcaccggcctcggtggggtcgaaatgcacccgttgcccgaccacgaaggccgcagtggggttctcgcccggcggctgcaccggccagcgcagggtggcggtgtggtcggccttgtccggtacctgcaactgcacctggcgttcgcccgtgggcgtggtctccaccttcttcacttccatcggcggcagcggcaccgccttggtgcgggtcgccctggcattgcgttcgctggccttgaacggcgccttggacagttcggacaggcccatcgaggccgccatcggcagcgacagcaccacgaacgaggtcacgatcacgctggcctcgctgctgttcaactgcggcgcggcgccggcatggacggtgggcaccagcagcgctgagagcagcaatgcagtggtgggaacgcgcaggcaacggaacatggagacctcctggtcagcgtggggcggcggctcagcgccgggtatcgaagatgtcccgcgggccggtagcttcgggcaggtattccagcgcacggccctggttgtccttcaactgccagccctggtcattgcccgtcggctcgaagttcactgtctggcccacggtgaactgcacggccgggtcgccaacgccgcgcgggtactgcatcgacgcggtgttctgcggatcgttggcatcgcgcagcagcacttcgcggcggccgtcgacggtagtggcaatcgcgctcacctccatctgcggcagcttgatctgctgcgggcgggccagcggctggccggcatcggcggcatcctgggcttccttcgccgcggcggcgcgggccgaggccaccatctgcgtggacatttccaggctcggtccctgcgggcccgggtcatggatgatcacgatgcggcgttcggcatgggcggccgatgaccaggccagcgcggtgacgatcagcatcgataccagggagttgtgcagcagacgcatgtcgttctccttgcgggattcagggcgaggcggcggtggcaccggccaccggcacatgggggatcaccagttcctgctgcagctggctgcgctggtgcaggaagtcgaacaccgattccaccgtcaccaccgaatagttgccggagatgcgttcgccggccggatggtcggtggtggtggcgttggccacgaacaggcgcgcacccacgcgcttgcccaggccgatatgcagcacgctgggctggtacttctgctggcgcagccactgctgtgcctgttcgcgcttgacgatggccggcgcgccttcggcctgcgccatcgccgccgccagcacctccagcacccactggttggagttctgatagtcggtggcgaacgggtaggcgaccacgttgtacttggtttcgtgcagcgccttgggctggatcgagggcgacaccagcatcgcgcgcagtgcggcacgcaagggggccgacggcacgccgatgcgcaggtcggtatggccgccgctctcgccgacgaagttgccgaggccctcgtggtacagctgcgagctgtcggtcttgcagcggttgagcaggtgcatcgcgcgccagcggccgtcgtcctcgcgcagcaggaaggccaggtggctgtggcgcaatccatagcggctcaggtcctggccaccgcgcgcggcgaccaccacgtccacatcgggcagcgcgtccaggcgttcggcggtggtccaggccacgtccagcatcgccgcctgcgatgccacactggggtagcgctcgcggcaggcggtgctgttggcccaggccggtgcggtcgccagcaggctggcgatcagcagcgcggcgcggggcaggcgggaaaaacgatccatgtcggtaccttcaacggcgggcaggctcgcgcgccgatcatacgctgctcagcgcagcgggcgatccacgcccttgcgcttgagctccttgtcgcaggcgtcactgatgggagccaccggcagtggcgggcgctggcccttcggatcgcgcagcgccggttgttcgcggtacgcgtccagctgctgctggcattgatacgagatcggatccagctcggtgggcgcggtggaacacgcggcgagcagggccaggggcagcaggagcagggtacgcatgaagatgttcagtccaacggggggccttggactgtaaccgtggtgccggatcgaaatgttcagaaaacgctgcgcacccggcattaccgcgatgccaggcgcccaggattgccggccagcggccggcactaccccagtgccaggcgctgtttcacttccgccgccacccgcgcggtttcgcgcagcggctcgatgcggtcgtactgccagtccagccagtgcgcctgcaaccgcccgcgttcgcgcagctgctgctggaagcgcgccaggcggccctgcgctgtgtcggccagcgccaccatcaccggcatgcgcgtggcgcacgcctccgagagcaggttcaccgaatcgggcgagaccaccacgcggttggcccagccgagcaggccgccatagggattggtaccgtcgccaccatcgccccagatcacgtgcggcaggtcggcgaacttcgcgcgcaggatctccgccaacgccggcggcgtgcgtcgcgaggtggtggccagcaggctgccgccttcgctgcggatctggtcggccagcgcctggaatacaccgaccatcgccgtctcatcccacggcgccagtggcgtcggcccgcccaccagcagcgcagtgcgcgggccgggcagggtgctgaagccggcgaacgcggcgcggccccaggccagccagtcatcgtccaccgggttgaggctgccgagcagggtcagcacgttgctgccgcgcagggcgtcgtgttcgggcaccaccaccacgtcccagtggcgcgcgccgatgcgcgggtcgaggatctgcaccacctgggtgccgcgtgcgcgcagcacgcgcagggcgccagcggcctggcggccacagccgatcgccaacgccggggcgtcggcagccagcgtcgcgaaggcctcgccgtagccgttcacatcgccgggcaggcgccgcggcgccagccagcgccagggcgcgcgcggttgcagcagcagcggtcggtgggtgccctggcgcagtgccgaggccagcgcgaccgcctggcggacattgcccgcacggccgtcagtgaccgtccagggcgcgctcgatcgtttcaccattggcattaattcgtttcagtcctgctgggtgttgcaacagtcgcgacactctacactgcggctcgtcgattcgccccgcgccgcccgcgggcactgactccctttcgccgccctggagatccaccgatgtcccacgcgctcgacgctgctgccctcgatcagctgttccgcacggcccgcacccagaacgccttcctcgacaagccggtccccgagagcctgctgaaggaactgtacgacctggtgaagtggggtcccaccgcggccaacaccacgccggcccgcttcgtcttcgtcacctcgaaggaagccaaggacaagctggccccggcgctgtccgaaggcaacctggccaagaccatggccgcgccggtcaccgtcatcatcggtttcgacctggacttccacgagaagctgccgtacctgttcccgcacaccgatgccaaggcctggttcgacggcccgcaggaaggccgccacgaagccgccatccgcaacggcagcctgcagggcgcctacctgatcctggccgcgcgcgcgctgggcctggatgccggcccgatgtccggcttcgacccggccaaggtcgacgaagccttcttcgccggcacctccatcaagtcgaatttcctggtcaacctgggttacggtgatccggcgggcctgttcccgcgcctgccgcgcctgtcgttcgacgaagcggcgcgcatcgcgtaagtcgctgtatcggtttcgggcccgccgtcgtgcggcgggctcttgctgcaccgtgtacccaccctacgatccggagagttcctcagatgagcgccacccgtaaactgctgctgccgctggccctgaccctggccatcgcgcctgctccaagccggccgacaccgctgccccggccgccgatgccgccgccccggccaccaccgagcaggccgccaccccggccgccgatgccgccgctgctgcgccggctgccgaagcgatcaagatcgcctcgggcacctacaagctggacccgagccacaccgacgtgctggcgcagtggagccacttcggcttctccaacccgagcgcgcacttcggcaacgtcgaaggcaccctggtgtacaacgccgaagatgtgaccaagtccaccgtggaagtgaagctgccgctgagtggcctgaacagcttcaccgccaagttcgacgagcacctgaagagcgccgacttcttcgacgccgccaagttcgccgatgccaccttcaagagcaccaaggtggaagcggccggcaccaacaagctgaccgttaccggcgacctgaccatcaagggcatcaccaagccggtcaccctggacgtcaccgtcaacggcggcggcgagcacccgatggccaaggttccggccgccggcttcgatgccaccaccaccctgaagcgcagcgatttcggcgtcggcgcgtatgctccgaatgtcagcgatgaagtgaagatccgcatcaccaccgaagccaccggcgaaaagccggccgcttgatgcaccccgctcactcgtcgtgagaaggcagaaggcccgctgaaaagcgggccttcttttggggtgccggggaacacgcgctggttgacacactggcactccgcaggccaaccaaggttggccactaccgggtacgcgccctcagcgcaacgcgcccaaccatgccacgcacgcttcgctcggactctgcttggccttcaccgccagcccgctcacccgcacgaacgtctgcgcggcctgcgccaccacctggcgtgcgatcagcgccgcctgcttggtcgcggcctgctgcttgcgcagctgcacgatgttgatcgaaggccggcccaccggcgcgtacttctggtcgcggcgcagcacgtcggccacctgggccacttcgaattcggcctgcaggtagcggtgttgtgccgccaccagctcgcgcagcggcgcgcgcagcacggcggtgtcggcgaacgcggccagcgccgcatcgcaggcggcgtcatcggcaaagcgggtacgcagcgcgtccacgctggccagggtcagtttggccatgtgggcctcgttgctgcaggaaaggagcgcgattgtcgcattgcttggcggctgatgcgttgaaccgggtgtcggaatccctgtagagccgagcccacgctcggctcatcgcgcgcagtgcgagggttttccgatggcggaacgaagagcagccgagcgtgggctcggctctacaatggcccgctgtatcacccacggaaggaagacccatgcaggacgcgcagtactggttgaacgaattctggtcgggcctgagcgtgctcgatctgctgggcggcagcgtgctcggtacgctgcttggcctggtgctgggtatcctcggctggcgctggccgcacagccggggttggttgcagcggcgcaagcgctggcatcactggctgctggccagctacgtggtgctgctgccgctggccacggccttcttcggcctgcagctgggcttcaccgccggtgcgcaccgcgcgctgttcaagcagctcgatcatttccagccgcacctgcagaccctggtggaaggctggagcgaaggattcaccgactcgctggacgacccgcgcatgcgcgaggcattgcgcagccagggcacggtgggcgatgtggccgacaccattgcctcggcctacctcagcgaacatccgttgcccggcctggaccgtcttggcaatggcccgttggcacgcggcaccggctgggtgatcggcaaagtgcgcgaaggcctgctgcgcggcatggtggaagacacgctggtggacaaggccggcacggtcgggctggaaccgaaggtggtgcgcgaggcgctgaccatgcatgtggatgagctgctgcacacccgtggcgtgctgcggctggtgaaggcgcagatcaacggcatgatgcccggcgtgtacttcgggctgctgctgccggtgctggtcatcgcgctgctggtggcgctggagatctgggccgcgcagcggttcgggtggacggggcaggtggccaagccgccggtcgcggtccctcctgtagagccgagcccatgctcggctcatcgcgggtagcgcgatgggtccatcggtggccgagcggagagcagccgagcgtgggctcggctctacacagtcaagggcgtgcggaccaacggtccgcacccaccaggcaggttctggtgcatggggtcagatcccttctccacaggaaaagggatctgactccgagccggtcaatcgccgtcggtttcgtccgggtgggccttccagtagccggtcgagcggatccagtcgcgcggcacgcccaggtggccttcgatgaacttgcgcatcatccgcgcgcggcgcgattcggtggcgatccaatagaagacatcgccgtccggtgcctcgaagtcggtcagcatgtcttccagcagcgtgctgccggccgccgggaagccgttgcgctccagccagtggatgcgcacgttctcgtactgcggcaggtcctggcgttcggcctcgtcgcgcacttcaatgaaggcctgcacctcggcagcgtccggcagcacgtccagccagcgggcgatggccggcagcgcggtttcatcgccgatcagcacgtaggcgtcgtaggtgtcggccaccacgaacgagccgcgtgggccgccgatcaccagcgtgtcgcccggctgcgcgcgctcggcccacggcccggcaatgccctggtcgtgcagcacgaagtcgatggccagctcgccggtttcgtggtcccacgcgcgcggggtgtagtcgcgcgacggcgagggcgccttgccgtccgggtagctgcggccttcggcggtcagcaccggcagcaccatctcgccgctggcattggggaagaacagcttgatgtggtcgtcggcgccgggcgaatcgaagccggccaggtcgtcgccacccagcaccacgcggcgcatgtgcggggtgacctcttcggtgcgcagcacggtcagttcacggaagcgcacatccaggcgcaggcgcgtgttgttgtgttcggtcatggggatacctgtaaaggtgtcgcgcgggggcgcgcggcatgggggaggacctggctggattcagtctggctgggtcgttgaaaacggtgggttctcgctaccggcggtaccgttgagcagggccgaggcccgcgtcagcagcgccgccacttcttccgcctcgccctcggcccagcggccgtggtgatgcaccagcgcccgcttgaactcgcgcagggcagtggccagcggcggcggcagcgaggccttggtgatctcgcgggcacggtcgaaggcacgtcgctgcgccagacgcacctgggtgcgctgcaccttcagctcgaactcgccggcagcggtgatgcggaagatccgcttcccatccacttcctcggcctcgatccagccggcctgctcgaagctggccagcagcgggtacatggtgccggcgctgggcgtgtaagcctgcatgaactggttgctgatcagctgcatcagttcgtagccatggcgcggctgctcgccgatcagggccagcaccagcaggcgcaggtcgccgcggctcagcacgcgtggctggccgttgcggcggggcaccgccggatcggtggaacgggctctgggagaaggggggcggctcatttcgatatatcggtaaacgagtgtgcaaacgatatatcgatatatcgaagccggcaatcaccgatccggccacaagcaggtccgttttgggccacggacggccgcgtgcacagcaaaaggggcgccccttgcagggcgccccggcgatgctgtggaagggagcagggccgccaggcccctcactcgcggcccacgctggacccgcagccggtaccgatccagaggcaggtgcgacatgttgtcgccggttcagtaccgttgcccgaaccgcccctacagcggtgccggagttgccctacaaccgtcatcggcagcggtaacactgcgtcctgcacatgggcgcagcggcccgcaagcgacagcccgcgcagccgccaaggcccgccgcagggccgtcagcgggcccggcaagtcccttgcggacactggccggttgcatccatacgcctgcgtagccaagtgacgaaagcccttggtgcgctacactttgcggtctagaaatctatacaacagtcgcgcgcgtgcgtgcggttatgggagcgctaatgaactggttgaacgaggtgctgaacaacgacccgaatcctgtggaaacccaggagtggatcgagtcgttgaaggccgttattgatgtcgagggctccgagcgcgcgcatcagctgctggaaggcatggtggaactgacccgtcgttcgggcgcctacctgccgttctctcccaccaccgaatacgtcaataccatcgaaccgcagttcgaggccaagagcccgggcaacgccgagctggaatggcgcatccgttcgatcatccgctggaacgcgatggccaccgtggtgcgcgccaaccgcaagccgggtgacctgggcggccacatcgcctcgttcgcctccggcgccaccctgtacgacgtaggcttcaaccacttctggcgcgccccgagcgagaaccacccgggcgacctgctgttcatccagggccacagtgcgccgggcatctacgcgcgttccttcctggaaggccgcatcagcgaagagcagctggacaagttccgcatggaagtggacggcggtggcctgtcctcgtacccgcacccgtggctgatgccggactactggcagaccccgaccgtgtcgatgggcctgggcccgctggccgccatctaccaggcgcagttcatgcgctacctggaaaaccgtggcctgatcgagaagtccgaccgcaaggtgtggtgcttcatcggcgacggcgagagcgacgagccggaaaccctgggtgccatcgcgctggccggccgtgaaggcctggacaacctgatcttcgtggtgaactgcaacctgcagcgcctggacggcccggtgcgcggcaacggcaagatcatccaggaactggaaggcgtgttccgtggcggcggctggaacgtgatcaagctgctgtggggcggttactgggatgccctgctggccaaggacaccaacggcgtcctgaagaagctgatgatggaaaccgtcgacggcgaataccagaactgcaaggccttcggcggcgcgtatacccgcgagcatttcttcggcaagtacccggaaaccgctgcgatggtcgccggtctttccgacgacgacatctggcgcctgaaccgtggtggccacgacccgcacaaggtgtacgccgcctaccaccaggccgtgaacaccaagggcatgccgaccgtcatcctggccaagaccgtgaagggttacggcatgggcagcgccggtgaggcactgaacccgacccaccagaccaagaagctggacgacgaagcggtgcgccacttccgcgaccgcttcaacattccggtgaccgacgcgcagctggccgacggccaggtgccgttctaccacccgggcccggattcgccggaagtgcagtacctgcaggaacgccgtgccgcgctgggcggttacctgccgcagcgccgccgcaaggccgacaagaccttcgtggcgccgaagctggaagcgtacgagcgcctgctgaagagcagcggcgagcgcagctactccaccaccatggcgttcgtgcagagcctgaacatcaccctgcgtgacaaggaactgggcccgcacatcgtgccgatcgtggccgacgaagcccgtaccttcggcatggaaggcctgttccgccagatcggcatctacgcgccgttcggccagaagtacaagccggtcgacgccgaccagctgatgttctaccgcgaagaccagagcggccaggtgctgcagcagggcatcagcgagccgggtgcgatcagctcgtggatggccgccggtaccagctactcggtcagcaacgtgccgatgctgccgttctacatctactactcgatgttcggcttccagcgcgtgggcgacatcgcctggcaggccgccgacatgcgtacccgcggcttcctgctgggtggcaccgccggccgcaccacgctgaacggtgaaggcctgcagcacgaagatggcttcagccatctggtggccggtggcatcccgaacgtgcgcagctacgacccgaccttcggcttcgaagtgacggtgatcctgcagcacggcaccaagcgcatgatggaagaccaggtggacgagtattactacgtcaccctgatgaacgagaactacacccacccggaaatgccggaaggcgcggccgaaggcatcgtcaagggcatgtacctgctgaccgacgccggcaagccgaagaagggcgagctgcgcgtgcagctgctgggttcgggcaccatcctgcgcgaagccattgctgcggccgagctgctggacaaggacttcggcgtgaccgccgatatctggagctgcccgagcttcaacgaactgcgtcgcgatggtttcgacgtggaacgtgccaaccgcctgcatccggaaggtgagcagcgcaaggcctacgtgaccgagctgctggaaggccgccagggcccggcgattgccgccaccgactacgtgcgtgcgtatgcggaccagatccgcgcgttcgtgccgatgtcttacacggtgttgggtacggatggtttcggccgttcggatacgcgtgcgaacctgcgtcggttctttgaggttgaccggtactacatcgcgcatgccgcgattgcggcgctggcgaaggaagggaagatgaccgcgaaggatgtggcccgggcgatcaagcagtacaagattgatccggagaaggctaaccctgttggggtttgatcgatcgtaaagtggctgaaagatgggcgatctactgatcgcccatttttttttcttccatctgggcaaaattttgtgcatccttgacaaagccacacattgatgtgtggttgttcagttgcataacttacggcacagggggccatggaatgggtaagtatgttgtgacagacctgactcggtttaaggaaggaaatgatgatgtttgtaccgcccttatcgatattgaatccggccagtgcgtacggcccactccatacttaaagaaagagtttgttaaagggcttggaattctgcctggcagcatcgtggaaggagagctttctcccgttaggggggcttctcggccgcatcgagaagattgcacctatggagagttgaaagtgataggcgtggtcacagcatcccaattcaagaagattcttgaatcttctctctctgaaagtgttacttctggattcggtcctgattttgatgggttgaaatttcttcccgttgacacgaagtctgatcgatcaatcataaccgtgaaaattaagccggactctttccgcgttgagaaagataacttcgggaagtacaaggttcatttcgatgacctttccggtaagagttatcggtatattccgataacggaccttgggttccatgagtacataaaatcaatcggtgtagacggtggtgacccggtcgaagaagttaactctcatttcaagggcgcgatcgacgtataccttcgacttggcgtaagtcgggttcatgaggctgcaggtaagaatggatactggatgcaagtcaatggaatatattcattccccagtaagctgcacaaaattcgaggctacgctgcttgaaaattttcactatcgggttcacgaagcggacggccgaagatttttttggttctcttcatgcgtccggcgtttcaaagatcgtagatgttagactgcgggcgaattcgcagttgtctgggtttgcaaaggtgcctgatctcccgtattttcttagaaaaatatgtgggattgagtacgaaatgcagcctcttttggcgcctaccgcagatctgctagatgcttataagtcaaagagaatgacatgggacggatatgcttcaaagtatgttgaattaatcgaaggaaggggggcttcaaggatggatgtcgcctccctggatggcgtttgttttttgtgtagtgagcatctcccacataaatgccacaggcgcgtcgcggctgagtatttgagatcagtgtttgatggtgattttgagatagtacatttgtgaaaaatagcattaccattgttggtgcttctgatggctttagggacgaagtcctgttgcgtgagaagcttggtaagtatcttcccggtgttttcggaggggacgtcattcttttgaatgacgtctccgggatgcttgggagatattttaaagatggtgttcttgactcaatttcgcctttcatgcacttgcgtgagaaaaggaagctgatttcccaggcttctcgatttatttatttttgggacggtgcaaccataagtgactttgttcatctttcggttgtgagtagaaagccagtaaagacgatttttgtaacaacaactcgagttgttaataaggatcgaggttctgagtatgacgtatatattgggagagggactccttggggtaatccatttgccattggtgaaaatggaatggatcgtcgtcaggtgatttccgcatacagggaattctttaagaagaaatttatcgacgatccccaggggaatcgtgacataagaacattgaagggccttgttcttgggtgtcactgcaagccagaggcttgccatggtgatgtgatctgcgagtatcttaactctcttgacgaagatgagagctaggctccatcgccggcaacactaattactcaagggctggacaggttggatctgaggatttaatcgatttttcctggcgctgacgtgggttcggtgccctctaggtgttcgtatgttactcaagcagctgtcgcgtggcacggttgattgctagtcgccataggctttctacaggccgcttctgcggtcgctcgtactgatcgcgcatgtggcccacaggtattctcgtttgcgcgcttgccatcttcaatccagctctcgacctcggccgcaaggcgaatagagtgcacgcctggtgatggcgaccgtcgctttgctctagatgatctcaggaaccaacgccgacttgtcctccatcatttcgcacggcggtagctcctttcggggaaaacggtgcctgtgaaggaattagtggattactacagagaattcgaggtcaatactctggggaatgtgatggaagatggcgcttatcaaaaacagcctcacgatgaaactccaagaaaccaagttggttcggggagaagactccatatcgaagcgatgcattcattttcaggccgagccgaatttgaacgtcggtaggcaggcccttcgcaattagaaggcgaccgctagacgagaagctgatccacccccgatcaaacaacaggtccgcatggggagccagcagaagaccgttctcgccattaacgcgctcgctatcagtactatctgcccacggcttgatatggctcgcgcgaaggaatctcaggtcctcaatgccggtcagtcgacagcccttctcaatgccgatcaggcgctcgcggaagaggcgttgcttcgtccgcacttcagtttcgcgtcttacgctggtcgcgccgacttcatcgatagtggcatcgatctcagcctggtccgtctcgctcgacgcgaggcccagtgaagcctccagcgacctcaagcggaacacgatcgcagaccttggctgcccttctcgatctggtgtgccaggttgaacgtaggaggactggcacatgaatctaccaaggtatcgataggggcgccctttgcccatcatctgaaacactacgagcgacttgccatccttgacgtgctcaccaattgctcggttgcccgctacatacttcatgtctccgacttgaccctcgccgaagtaatgaaagacttcgtcgtcgtcccagaaatcatggtagccatgagacacgccggcctcgccagtgaacgcgatgactagcggatgctccttgggtgtcgaaatgccgccttgctgttgcccgccaaatacgccatggatctgcttttgacggttgtagagcgcgcccacctcgaatgggagttccatcctagatccctgtcccagaagctaagtgcccaggattctagccagaaccaggttccttgcgccattgattgacgcgtttggctgccggggcagggtgcagatgggggtctacttgggcacagacctagggcagctgctctcaggtgcgctcaggttcctcctgcgtctctctggtgagccccatccatctttccagcgctgtagctctattacatcgcttgcgaccgtagacatagtgactatcagaagactcggcccagagttgtccacgaacagaacggcatcgccgcgtacgctcatatcaaagaagcgtctactggaatcatgctttccgaggatgacgccttggcaagccaatgcttcggcgtagttctcggcatcggcccgaaacagggcaaactccgagtcggtgagtcttgggtagttctcaagactcattgtggtggctggcgcgtacgtccctccaatgatcaatcccaatagcgctgccgttgtcagggcaagcaaagtccggctcggcatagtgaggccagtgttgggggctaaagggctcagacagcggcgaatgcttgggatcgtgcgtacgatccgcgcattgcactcgatgtacgtagcgaagcgcgctctactcccgaacctgcagccgctcaatagcctgcgcagtcaacgctacacacgccatcttcaacccttccatcacccgatcccccaggtactcctcgggcgcgccgttctgccgagtccgctcagcagccagcatcagttccgccaccacacgcagccccgccagcgcgcaatccgcatccgccaactgaagacagcgcccaggcagttgatgccgctccggccaaggctggccgtccgcagccgcaccggttccgatgcggtgcagcgtggcgacgaaggcgttgggatcgacggaaggttcgcgctcgggttcggcgttgtccggatcgtactgcgcgtgcagggaacggaagtccgatgtgttcatggcaatgctccgtacaggacagatagcagcgccacctataaaggcggcggacggtgcgtgtctcgaaaaccggtgagtacccaagccggcgggcccgaaggcccccacgcaccgcccgccatggaacgcgaacggattgccagccggcgccatccgaagatgacgccgactggcaagcgtaaagcactgggtattcagacgggttttcgagtcccgcgccaccctcttccggtggcacgccaagagatacccgtgcagcaaccaaatgccaagaatccacaggactgatgattgccagtcctgacgctttcggcattgtcgcacacggtgttaagccagcaagcgatcgctgcaacggtcttgaagggcttggcgctattgaccccaagcgtaggaatacctgcagccatgccaatggcctagggccaatcgcgacaaattggaccagcggttcagccgggcggcgcctcggccgtgggcgcgaaggtcagacggacccgaacccgcgcatgcagcgcgacgccctcaaccacgaccggatcaaagcgccactggtccactgcggcaaacgccgcacgatcaatctcccgcagtccgctggaccgcgccaccatcacgttggaaacgtgagcccagctcatccagttgagcaaccaacagcaccgccatggggacctgcagcacggtatcgagcggcgcgaccggggccgttgaatacacaacggcaggcgcctgccgcagctcgaaggtggggttgtcaccgcgcttcacgaacacttcagtggaaacctgcaggtctgccgtcatggccatggcaggtgtagcgcccagcagcatcagaacgaggttcagtgccagggcggtgttgaaggggggcatacgtggtttccattccggtgcgctgccagcttagcgtccatcccctggcatcgcttgccttgaatgccggcgtgcgggacttctgcgcggattacataggcacgcccgaccgtggccacagcgcatcgtcgcgctccaggtcgtagtcgctgccgaacgctagcgccgcctcgcgcggcgggaggtctgcgtagcagcccagcaggtactcatccatgccggcatcgcgatggtcgatggcgaacaggtggagaagttccttgtcgaaggcttcccgccatgcggtgtctatcgtggtcatcgtcatcctcctgagtgcaggagaggatggccttcgcggatctcacgcgctggcaatcaatgcacgcggatctcaaatatcactcggacccgcacacgtgccgccacggctgaacttttgtgttccgtaggcgcggcgccactgccggagtgcatccagcgccgcacgatattcatcggcaggcgtccagcccgccgctgggcaatgtgaagccagttcaggtcctgccggccggtgcggtgtataaactgccgacacgtgagtgcccgaatgtgaggaacggatgcgacacctactgaggccatggatggtactgctgcccctccttatgggcggctgtggcacgccggcaccccagatgtatggcgatggtttccctgtcgcaaagccgatggacctggtccatgcaggtgcgacggtagaggcgcgtttcgaactgccaccgccttgggagaaagatcccaagcctcgcacgttcctgatcggattccgtaccggtgggcctgccaagcgtccggacatgaagccgggcgatgtcgacttccttgaaggcgcccggattcccctgaaggtgcagctgtggaagctggagggggacaccgaaacacccatagcactgcaggtattgaatcgcgatctgcctgctgtctggcagggcagccgatatcaaccggccaagggcgatgtgtacgaatacaggagcgccgtcggcgcggattcgaacagtctggtcaatgcaggaaagtacgacatgtccctggcctacagggagtacgaagtggcccgtgctgattccggggatctgacggccggtaagtaccggctgaaggtgaccaaccttcaggcaaatccggaagttgaacatctcaacatcgagcttctcgtcgccaactacaacgtgaaataggactatggacagtcaagcgaatagtgcagccgcaccccaggaaggcaagaaggggccctacaccgtcacggtctacctcgctgccccggggacacctgttgcaggcaaggatggcacgacccactcatcttcggcgggccatgcctacttcatggttgccgatggtgacaagaaagacggatatgggttctcaccaataaagacggggatcaccgggcctgggcacgtggtcaagggggaattcgagacctatcagaaccctcggttctcctacacgctcgagatcaccaaggatcaatatgacaagttgaaggcgtacggcgaggcgagcgtcaatcgcgatcaggaccgtttcaatctcaactacaacggtttgtcgaacagctgtgtcgactacgtgtggacaggccttggtcaggccggtctgcgacccaagctggagaagcccaatcccgacttcgaagggacgatgaaggtgcttccgaacatcgatgcgctgaagagcatccccaagccgttccccgatagcaagctcaattcgacgcacgagaacccccttcccaagaagcaaaccacgttgcagaagctgttgaccgaggtggagggcgaactgccgccgcaggagcgtttggctgcactgtcgccggaatcgcagcagctgtttgaccgcatgcgatcggagctgcctgagaaggtgagcgatgcgcaggtgatgtcagcgatggttgctgcgcgggagaacggcattcaccagccgcaacagctgcgcgatgtggtgctgcaggaagagaagatcttcgtgatgggcacgacgcctggcttcagggccatggtggatctgaaccagcctcagcaaagccttgaggaggggctggcccgcagtcagcagatcgacacgcgagtgactgagcagacccgtcaggaaacgcagcagcgcgaggcggcaacccagacgtccggcggcaggcagatgggctagtgccgccacccgcgcgctttcgcggcgctggtactgcatgctggctcacatattcagcaagtcgcgatcggcgtcctctattcctccacctgtcccccatcccacctatgccatcatccgcccaggaccgcagcacccaacaaggctgagcaggcatggagcaggcaactcgctacaccgtaaccctttatctggccgcgcccggcaccccgctgaaaagtgggggcatctcgccgcgcggccacatgtacctgcaggtcgctgcgggcgacgaggcccacagctacggcttcgcaccaccgcgccaggcgccgggcgaagcccgcaccggcgtgcagtacgcgcaggtgcgccacgacgatgccgaccagcatctggacccgtactacagccgcaccctagaaatcaccgaggagcattacggctgcctgcgtgatttcgccgaggaaccggccgagttcgaattcgatgtggatcgcccggccaccatcaaccgttgcagcgatttcgtctgggcggcgctgcactatgcgggcttgcatccgctgccggcgccgctggatggcggcagcaacctgggcgagttcgcggtgctgttcaacctgccagagatccagtgcattgccgcgccgttcccgggcagtgatctgaatgccgagacccatcatgcgatgcccgagcgcgaggccgagcatcatcgccagggcgaccgcgccagcgatgagccgccgccgacgccgattgaagtggccggcacgctgctggacccttcgcatccggaccatcgcctgttctcgcagctgatccagaaagtggccgaactggacgcagcgcacggccgcccgttcgatgcggccagccagcgcatcagcgccagcctgctggtgctggccaagcagaacaacctctcgcgcgtggaccacgtgctgctcagccaaccgacccagaacagccacgccgccgagagcatcttcatcgtgcagggcgaccgcaacgacccagggcaccgccgcgccagcatcgccaccgaggtggcggccaagaccgatgtggccgattcgctgcggttgaaggagcaatgacgcggccacttcggcgggggctggtggtactggcggtgctgggcgcgctgacggcatgccgtgcgtcaccagcgcctgaggttgcgccgcccctgctgacgcgcgcacaggccgaggcccgcacggttgtgccgttcacgcgggccgtgcagttgcagaaggccggtcggattgccgaggtcacgtttgatttgccggcggcccagaagccggccattccgatcctgaacattgggttgcggctgcaggataccgacgcgcgacggctgctggatgcttcggagaagatcactctcggacgtttgccagcgcggctacgcctggagcggattgatggcagcgcggctcgtcatgtacagctctggcagcgtacccgcgatggacgcgactcgcagaagatcggggatgatggcgtggtcacagacctgacgacggggagtgtggacatcaacagcttggccgaggccgggttgtactctgaagacgtgctctatcgcacgctgcagctggcgcaggtcggaggcattgcacccgggcgctacgttctgcgggtcgaccttgtggaggatcgaccccagctggacggcctgaaagcagaactgatcgttggctaccaatcactaggaaagtagacatgcacaaggacgatgccgaacgctacagcgtaaccatccatctggcggcccccggcacgccgcgctacggccgtgatgccgagggaaacaggtttctgctggagccttcgttcgcggggcacatgttcctgtcgctgcgccgttcgggtgaagccttgccggagagcattggtttcacccacgcaggcaccaaggacgagccgaacaggggcaaagtcgatgacatggacgtgtcggtctacgacaagccccgcttcgagcgcacgatcgagatcagcaaggcgcagtacgaccgcatcctcgagttctcggcagacccgaagaagcacggcttcgacatgaactacgacttcttctccaacgcctgcaccgatttcgcctggggtgccctgaaccacgcaggcctgcgcccggtcgggctggccggggagatcaccaactacgagggcgccaccagggtcctggacaacatccgcgccgtcaacgccattccgcagcaggtgaagggcagcgagctggacggggtgcagtggaacccgatgccgaagcagaccttccgcgagtggatgttcaccgagaacggcgagcagtggcgcggcaacagcaccctcgcggcaagcggcacgcccgcagacccggcgcacggggatcatgcccgtctcaaccagatccaccagcaggtggccgacctcggcgctttcggtgcacgcaacggcaatgtcagtgccagcctgctcgcgctgtcgaaggagcagcagttttcgcgcgtggacgaagtggtgctgggcgagcagcgcggtgataccgcgccgaagctgttcatcgtgcagggggaccgcggtgacccggcacaccagcgcgccagcatgccggcggagctggcagcgcaggcaccggtagaggcctcgttcgaacgggtggcgcagatgcagcagaacctgccgcagcgcgatgtgcagcggctgcaggaagagcagcaactgcaacagagccacggcccgcggatggcatagccggcgggtagcgccaaggtcgaacgtctgccatgcccgcgccggcgcacgccacgcccccccacctgctaccattcccccgcaaccccagccagcccacccgcgcagacagatgcaggtcgggccgtcgcagtacggcccagcgagccaggacaccttcccgtgcccattcaaggacgctcgcatgttccgtactcctctcttccgctcggccgccctggccgttgccgtttcgctcagcctcggcgcgccttctgcattcgccgacaatgcgcccgccgccagcgccaccgccgccgtgcagcgccaggccgtggccaagggcctgtacgagctggcctacagcccgaaacagaacgccttgttcgtggcctcctccggcggtttcggcgatgacgccggcccggcccaggtgctgcgcctgaatccggccacgctggccgtggaaacccgcatcccgctggagcgcaaggcgtttggcgtggtgctggatgacgcccacaaccgcctgtacgtgggcaacaccgtggacctgtcggtgaccgtggtcgacaccgcgcggaacaaggccgtcggcaccatccagttgatggagaagaagaccggcaaggacggcaaggccgcctacacccacgacctgcgcgagctggtggtcgacagcgccgccaaccgcctgtacgtgaccggccacagcagccagccggacgtgagcagcgtgctgttcgtgatcgataccaccacgctgagggtgatcaacaccatcgatggcctgggcaatgccaaggcaccgggcctggcgctggatgtcgccaacaagcgcgtctacaccagcaacctgttggccgagctggtggtggtgggcaccgattcgaacaaggtggtggcgcagcacaggatcgctgccgagcagccgatgaacatcgcgctggacccggccggcaagcgcctgttcgtgaccgaccagggctcggaattcctgcgtggctaccaggccaagagcagcggcctggtcagcaagcatccgggccagcgggtgctggtgctggaccgcagtaccggcagggaactggccagcatcccgaccgatgccggcccgctgggcatcctgctggatgcaccgcgcaagcgcctgtacgtgaccaaccgcgaagccggtacggttaccgcgtacaacagtgacagctaccagaaggtggcgacctacaaggtgccgacccacccgaacagcctggcgctggatgcgaagaacaacgtgctgttcgtgagcatcaagaacggcgagaaggatgacaagggcgctgacgagagcgtggcgcgcatccagctgtaaggcgctgacgcaaggccccgcgccgtcgcgcgtcgcatgaggaaggcagggcgcaggctctgccttcttctttgcccggttgcagtgcaataggctgcccgctagggttgaagcccatggcagggagccaaaggatctgaatcatgctggctatccgccgctggctgcgcgccggcctgatcttcacgctggcgggtgcactcggcgcctgcagccgcataccggatgcaccggagccgctggatctggtcaagccgatcaacgtgacccagtctggccaagcggtgcggttcgagttcgagacgaatgcccgcaacttccacccgggtcgcacgtatgcgctggagctggagttgcagcgccaagagacgcgaaagcccgacgagcctgacgtgggcacaatgcggatcccgttcgaggtgatcctgcagcaatggcgtgctgatgcctggaaggatgttcccacctacgacagccatcaagccggggtgctcaatgccggtgagcagcttccggaatggcatgcatccggcgaatggcggtatacgtcgccgcacatgggcagtgatggccagtacacgctgagcctggttgctctgccagtggaaattgactcccgctaccgcgtggacgtgcgcacggtgcagaggaccgaggcactgcaggattactcggcccgcttgcggatccatgccgcccgtcccgccggaaagtaatcaatcgcctggttgcggcgccactggtcgctcgccaggataggtacttcatggcaggacgccaaagggtcttcatcatgctgggtatccaccgctggctgcgcgccggcctgatcttcacgctggtgggtgcactcggcgcctgcagccgcataccggatgcaccggagccgctggatctggtcaagccgatcaaccttgccgagccaggccagacggtgcggttcgagttcaagacgaatccccgcagtttctatccgggtcgaccctacgtgctggatcttgaggtgcagcgacatggccccgggcctgacagtgggcctgacatggacaatgttcatgttcccttccagctgtccctgcagcgctgggtcgcaggtgcctggcaggacgttgcaacgtctgatgtccatcaggcaagggcgcgcagtctgggtcagccgctacccgaatggcatgagtcggcagactggcgctacgcgcatcaggtatcgatggacgccagccgatacaggttgagcatcgtcaccctgccgatggaaaccgatgcccgctaccgcctcgatgtgcgcacggtgcagcccaccctcttgctccagcattacccggcacagctgcgggtccacgcggaccctctgtcgggaaaatgatcagagacttgcgccgctccgccaacaacgctggaggcggctcagcccagacggtgtgccgggttctgctgctgctcctgctcacggatctgctgttcgggcactaaccccacggccggctgctgcggggccaaccccaacttctgcatcgactgctccaccggcgtctgcgccgctacggccgtcggcatcatcgcgcgcaggtgcgccggattggccgggtcgccctgcaccacgaagacgttgtgcccggccgggtgctgggccgtggcgttgctgaccagcacgtggtcgacctgctgcaggccctgctcgcgggcgagcacggtcaggctggcggtcaggcgctcgctggtctggtcgaacggacgcccatgctgggcgtccagtgcggccacgccctgacggatctgctggttgaggccgtagtcggggtggttgggggtgatctctgccatggcgatcgaacggtagcggtgggtcggggtcaaccccgccagtatagatccggccggtgaagggcgccggaaaggtcagtccgccggccggtggtcatagctgatcacccgttcggccagccagtgcccgtccacgcggcgccagacctggatgaaacgggcctggccgacccagtgctccacgccgtccttgccgcgctcgtggaagcggtggtcgccgatttccagcgcccgctcgtcgtgcagcgggaatacctgcagcgaggagtccaccagctcgcgccgcaggcgccagccgtccttgcgcgcgttgtcgcacaggttggccacgctgcggcggaaatcctcgcggttgctggccgacttgccgtccttgtcatggaagaactccatgtcttcggtggtcatcgcggcggccttgtcggcgtcgcaggcctcgaaggcgacggcgaacaactggctgtcggcctggcggatctgttcgcgcaggtcatcgacgggcgacggtgctgcggcgaggccggcggccagcaagggcagggtgagcagcagcatggcaagactcccggggatggtctgcgcaggctgacatgccggtgaccacggcggtacggcgctgcgacgaaaccgcctgggcgcggtgcgaaggccggccaggccggtgcggcttcgcgtggcggcatgtgcaggcgatgtcatgagggggcgtgattccctcacggctgccacaggacgcggccgctagcctgcactcctccccttccacaggagcgcccatgcctgcttcccgcatccgcctgcatgttgaagataccggtggcgacggccgcccggtgatcctgatccacggctggccgttgtccgccgatgcctggaagacccaggtggcgatcctgcgcgatgcccagtatcgggtcatcagctacgaccggcgcggctttggccgctctgacaagccggccgagggctatgactacgacaccctggcggcggacctggcggggttgatcgaggaacgtgacctgcacgatgtcaccctggtcggtttctcgatgggcggtggcgaggtggcgcgctacgtggccaaccacggccaggatcgcctgcacagtgtggtgttcgctgcggcggtgccgccgttcctgctgcgcagtgacgacaacccggaggggccgctgacccaggacaaggccgatgaaatgcgcagcggattggagaaggatcgcgaagcgttcttcgacggcttcacccgcgacttcttcagcgcccacggccagctgatggtgaccgaagaaacgcgccaggcggcgatcgcgctgtgccatcaatccgaccagacggcggcactgggctgcatgcacgcgtttgccactactgattttcgggatgacctgaaaaagatcacggtgccgaccttgatcctgcacggtgacagcgatgccatcgtgccgtttgagggctccggccagcgtacccacaaggccatcaaaggcagcgaagtggtgatcctggaaggcgcgccacatggctgcaacaccagccacgccgaccgcttcaatctggccctgctgaacttcctgaagcgctaagctgcggccatgcgccagaccagaacccccccatggaagaagcccaaccccaagggccagacgtcgcaaccgctatcggatgcgcagaaggcggcggcacggcaacgtgccgaggagaacgggcggagctatcccaacctggtcgacaacatgtgggcggcgaagctgccgcgtgggtcgtgattcaaaggctgggtgtagtcctggtgtagagccgagccgatgctctgctggcgcgcgcagcgcgtgccagccggagaaggggcaaagggcagcggggcatggactcggcgctaagggccgggcagtggctgccagcccgactccctccacggcgcaacctcgcgttgctgtacgtcaatggcctcgattggcaacccggccagccgtgccagttccgcacgcagcatttcggtgtccaacggcagcgcgatggccacctgcaggcggtcgccctgctgccggacctgcacgggcacgaccgcatgggcttcatgctcaccgccggtgcgaccgatcgggtagcgcatcgccgtgggccgccccagctgtgcgagcgcgggttgccatgcctccagcacgacgggctgtgcggccacgggaacctgcgcctcgacgacggttcccgcataaccggtgagattgtccaccatcacctggaagcgtgcgccatcggggatgaccagcacggtggcgatcagcgccatcagcgagaggatggccgcggcgacgtgccagctgcggggtgcggtggcggcgcgggttgccgtgcgcaggcccggcttgcgccgcagcttgcgcgcgtagatgcgtcgatccttcctgcgggggctgctgctgtgctccggcaggttcaacgggacgcgtggcatccgggcgacgcgcgcattgatcaggcgcgagagcagccaccatgcgagcacgaacgccagcagtggcagcagcgttcgtaccaccagatacagcatcaccatcgggaacatcctgcttggcacacacggattcaatcaacctcgtcatcgtaacggcgctgcgtggtgcgtgtcgcatccgccagccgacacgtgcgaagcgcttggttaggatggctctttgctgtcatggatgaaccgatgagcgccgccacttcccgaatccgccgcatctgtgggcaggggccgatcctgttgatgctccagtgggtcgcgctgctttctgtggtgctggctgccggcttcttccattaccgcgtggagctgttgctggagccggtgacggtggcctgtgggggcccggacgcgcaggcgcgattgcaggttgccgaacaggtgatggcgcgtgcgggcgcactggatgactggcaacccctgggctggattccatgggtaggcctggtgctggccttgctgggggccatggcggtatgcgcaagccgtgcgctgtggctgcgcgatcggctgcgcacggcgaacgtggcgcttatggtgctgcacggtggcgcactggctttggccggatgggtactgcacctgtacgaggatgcgtggagtaatgtggcgcggctgtcacccacggcgtgcctggtggagctggtgtcggagggcgatgtaccgctggagcaggcgcagcgcgtggtgttccacatcctgacgcgggtgaacgcgccactgctgcgtaatccggatgatctggcgctggtgttgacggtgctgttgttggccgcgatggccggcggcgttgccctgtggcgtgcgatcgcgcgggcccgggcgggctgagcacgctcggcggcgcgcggcaatcgcgctacagtcgacgcctcgccactccagggaagacccgatgcgcttgttgctgcgtgcgttgccgttgttgctgtgttcgctggcggtgcatgccgccgaggtggaccgccgtatcgcggtgaccatcgatgacctgccatgggcacggcttgaccagatcgtgccgccggatctgcaggaacggcatgaggcgttgatggcccagctgcgcgaggctggcgtgccggtggtgggcttcgtcaacgagaacaagcttgaggttgatggacaggtgcagccgacgcgggtacagatgctgcgcgactggcgcgatgccggctatgtgctgggcaatcacacgtactcgcacatggatctgaatgcgaagggcctggcggcgttccagcaggatttcctgcgcggcgagacggtgctgcggccgctgctggccgagaaggggcaggcgccgcagtggatgcgccacccttacctgcgtgccgggcgcaccgcggatgagcgggtgcagatggatgcgttcttcaagcagcatggctaccgcgtggcaccggtgacggtggacaacggtgagtgggtgtgggcgttcgcctatgccaacgtgatgaacgagcaggcggactcgcccgcgcgcgcggcgacgctggcgcagctgcgcaagggctacgtgccgtacatgctgaacaagctggactattacgagaaacagtcgcaggcgctgctggggtacgcgctgccgcaggtgtggctgatgcacgccaatgagctcaacgcggccatcttcgccgaactggtggcggccacgaagcgccgcggctatcgcttcatttcgctggacgaggcgatgcgtgacccggcctatgcgcggggtgccgagggctacaacggccgctatggcccgagctggctgcaccgctgggcgatggcggagagcaagccgaaggatttctacgccggcgagcccgaggtgccggcgtgggtgatgaagctggccaaggtcgattcggagtaaggctcagcgcttgacggccagcacgccgtccagcgccagttcggccttgaaaccagccttttccaggcgcttggccacttcacgcggcacgtcgcggccgctggtcagcttgttcggcgcaccggtgtagtggaacaggcggccgcccttgcggatcacgcgggcgaggtggtcgtagaacacctgtgagtacagctcgccggcgatgccgaagcgcggcgggtcgtgcaggatcgcgtcgacactgttgctggccacctgttcgatctgctgcgagacgtcaccgtggctgaactgcaggcggccaccggcggcagccgagtccggatccggcgaccacgggttgagcgtgcgcagccacatcacatcggcgttcttctcgaacgagcggatctggccgacaccggcttccagcgcacaggcagcgaagtagccgaggccaccgcaggtatcgaggatgaccttgccggccggggcgaccagctccaccttgcggcgtgcatcctcgaacggcgacagcttcgaggtcggcagcatcttgatgccgtcgatctcgaaggtcggtgcgccccattcggtcggcaccagcttgatcagcgagccgctgtagcgcgagatcggcgcgaagtcctcgccatcccagtagtacagggtgcggtccttcagcttgcccggccagggatagggctggccccggaagtggaagccgtccgcatcgagcgccacgctgtcctggctgcgcccgaggtcgagcgagccctgccagtcggcggcgcccttttcatgggcacggcgcagggtatcggcgctgtcgcgggtcagcagggggccggtgtaatggggcacggcgggtaccggggcggttcgggggagggcatggtaccgcagctgttgtagagccgagcccgccctaggctccaccatgcctgcatccacgcatggcgtggatcttatctcttgccgatctggcaccttgggtgccgagagcccggcgtgggcgaccgtgtggatccgggtcttgcgaccgagaagtagcttgggtccccacgccggattctccctgaaccgcccgaacagttggttgagttggcgctcgaactgataagactgggcaagcggggagagctctcgaccctgtcagcctagcggagttctgtcatgtttgggatcgggatcgatgtgagcaaagccacgctggatgtggccgtccatggagagcagtttcgccaattcagcaacgacaagcgcggctttgtgcgcttgattcggtggctgaagacgtggccgatcaagcaggtcgttcttgaggcaagcgggggctacgagcgtgctgctctggatgtattgcacgccgccggcctgccgatggtgcgaatcaatccggcgcgtgcacggcgatttgcccaaggcacgggccgtgccgccaagaccgatcggctcgatgcgacagtgctggcgcagatggcccatttgttaccgctgacccgctacgtaccgcctgccccttggcagcagcgtctggctgaatttgcgcaatgccgcaggcatctggtgcagatgcgggtcagtgagatgcagcgcttgcggcgattggtcgatccggatctgattgcgatgaagcaacgccatatagcccagctatctgacgacctgaagcaactggataaagctattgccgagcagcttgagggacagcctggctggaagaacatcggcgcgctcaaaggcgtcggccccatcctgatcagcacactggcctgcgagttgcccgaactgggcagcttgggaagcaaagccatagcatcgctggtggggttggccccgatgaaccgcgaaagtggcacctggcagggccaacggcggatcagtggtgggcgcgcagtggtacgcgaagccctttacatggcggccctgacggccatccggtacgagccaagactgcgcgcgttttacgctggcctgaaggccaagggcaaagcgagcaaggtggcgctcgtggcggtcatgcgcaaaatgctggtgatcctcaacgcccgtaagcgggacgccgaggtggccctcggctgcccctgacaagacagttgctactgcaaacgtagccgagcgtgggctcggctctacagttcaatcgcacttcaccgcatacacgggcccggccccgatcagcatcagcgccatgtagtcgctgtcgctggccttgcccttcagcgtcgcgcccttgttgaagtggaagatgccgaagccgccggacatgcggatcagggcactgtcgatctggtcggcgtcgtcgcggaagtagcggctgatctcgctggacgtggccttgtgcagggcgttcggttcgcgctgccactgctcgccacggctgaaggaaacgaagtactggccgccttccttgtcgatgcggaagtcggcgggcttgcgcgcgccggtggcgaagcagccctgcaatgggtcggcggagaagggaagccgcgcatcgtcgccgcaggcagtgagcagcaggagggcaccgggcagcagcaggcggagcgtgcgcatgggatgtccctacagggcaggtgcggctagtgtaggcagcacgcgggcgtggcccgtacagaaattcggcaaggacacaggggttttcggatggcgcagggcaaggcaccgtggtgcggcgtggccagttggctggggattgctgtggggtggggggcaggcaccgtggcggcgcaggcggcagtcgctgccggtggcaatggcatggccgctgggctgggcgtgggcgtgctgggcgcggccttggtgggcggcggcctggcagtggccgcgcgcgtgcgtggcgagcgctggccatggatcggcatcagcggtgcggtgctgagcgcgctgccgctgctgatgtacctgctgcggatgatgctgaagctctgactgtagagccgagccatgctcggctgatggcctgcggcagccgagcatggctcggctctacaagtgcgacggcagtcggacaaaatcagctgcggtggatctccaccgttacatgcaccagttcttcgtggatcgccagcgcgttgcgcacggtatcggcatccagcgtggcgtcactggtgaccacgctggcgctgaccgcgtatttgccacgaccgacctgccagacgtgcaggtcggccaggcgtgccggccacgggccctgttcgatcacttcgcgcacttcggccaccaccggcgcgtccatctgcgcgtcgagcaggatgcggccgctgtcgcgcagcaggccgaccgcccacaccgtgaccagtacggcgccaaccaggcccatcaccgggtccagccaggtgaggccaagcagcttgccgccgagcagggcgacgatggccagcaccgaggtggcggcgtcggccagcacgtgcacgtaggccgagcgcaggttgaggtcgtgaccgtgcgcatggccgtggtcgtggtgttcgtggccatgcccgtggtcatggccatggtgatgatgcgcgtggcccgggctgtcgtgcagccaccaggcacacagcaggttcacgcccagcccgaccgccgcgatggcgatggcttcgttgtagtggatcggtgctggtacccacagccgctccagcgattgcacggccatcagcgcggccacgccgagcagggcgacggcgctggtatagccggccaggatctcgatcttccaggtgccgaaggcgaagcgcgggtcgtgcgcgtagcggcgtgcgcagcggtacgcaaacaccgagagcccgagcgccagcgcatgcgaactcatgtgccagccgtcggcgagcacggccatggagttgaaccaccagccgccgacgatctccacgaccatcatgctgacggtgagccacagggcgcggcgggtattgcgttcggccagcgggttgccgtcgtcgaagcggtgttcgtggcgacgggcggcggcaagggcgtccaggtgcatgggggccagcggtggagtggatacccccatagggtatatgattccggcatggctcatgtacacaagcatcgaaagcagttgctgacccgggtgcgccgcatcggcggccaggtggcggcgttggagcaggcgctggacaggccggagggtgaggccggcgactgtgcggacgtgctggtgcaggttgccgccgtgcgcggtgccgcccatagcctgctgatggagctgctgcacgagcacctgcaggaacacgtggtgggcgccgaagacccgcagcagcgggcggccgaggcccaggtgctggtcgagctgctgcgccgctacggcaaatgaccgggtagtgccggccgctggccggcgactgcaggttgtcttccccgttcatgaggttgccggccagcggccggcactacccgtggcggtgtcgcgcgttccagatatgcgtggcggccagcagcaggctgccggtgaccgtcatcggtgtttcccagtcgtgcgagggcagcgccaacgcgccggccagcagcaggccgagcccggcgccggcggtggcccaggccagcacgggcagcgggtgacggcgttctgcccgccacagcgcgtagccggtcagcggcaaggcgatggccacgaacagcagatgcacccattccgcttcggcccacgtgccgaacagcggcagcgcggcggcaagcaggggcagcgccaggcagtgcagcaggcacaggctggacagggcgaccgcgccggcatcaagcagggcggcagaaggcgacttcatgggggaggttccttgcgcagcaattgttatacagtaacatttccgttccgcagccaacccgctccgacatgaacactgtttcccgcgccgaccgtcgccttccggtcaccgtgctgtccggcttcctcggggccggcaagaccaccctgctcaaccagatcctgcgcaaccgcgagggcctgcgtgtggcggtcatcgtcaacgacatgagcgaggtcaacatcgatgcgcagctggtacgcgagggcggcgccgaactgcgccgcaccgaagagacgctggtggagttcagcaatggctgcatctgctgcacgctgcgcgatgacctgctgcaggaagtgcggcgcctggccgatgcggggcgctatgactatctgctgatcgagtcgacgggcatcggtgagccgatgccggtggcggccaccttcgcggtacgcgacgagcagggcttcagcctgagtgacatcgcgcgcctggacacgatggtgacggtggtggatggcagcgcgttcctcgccgacttcggctcgacgctgcgcctggccgagcgtggccagcaggctgggccggatgacgatcgcggcgtggtcgacctgctgtgcgaacaggtcgagttcgccgacgtgatcgtggtcagcaaggtcgatcagaccgatgacgaagtgctgcaggacacgctggccgtgctgcgtggcctgaaccgcgacgcgaagctgctgctgtccagcttcggtgacgtgccgctggccgagctgctggacaccggtcgcttcgacttcgagcgtgcgcaacgtgcgccgggctgggtaaaggagctgcgtggcgagcacacgccggaaaccgaggagtacggcatcgccagtttcgtctaccgctcgcggcgaccgttccatcccgcgcgtttcgcccgcgcgttgcagtcgggcatgccgggcgtgatccgcagcaagggctggttctggctggccaaccgcatggactgggtgggcgagctgaacaccgtaggtgccgcgacgcggacgcaggcggcgggattctggtacgccgcacgcgatcgcgtgcgtgctgggctggaggacacgccgccgttgctgccgcccacgccgctgccgtacagcgacctgggctgggcgcggcagcaggccgattgctggagcgcaccgttgccggggccggaagacttcccggatgcggccgcgcactcggcgatgcaacgcctgtggcacccgttgtggggggatcgccgccaggagctggtggtgatcggcgtgcacatggatgagcgtgcggtacgtgcggaactggatgcctgcctgctcaacgaccaggagctgcgtgcgggcccgctgctgtggcatcagttgccgcaggcgttcccggtgtggaagcggtgacggtgcactgaggatcgatgggttgccggccagcggccggcactacccctggtcgatatgccatgcgtggatggatgcatggcggagtcgagcatggctcgactctacaatgtgatccgtcgcggccaatcctgtagagccgagcccatgctcggctgctgcagtagatccaggcatggcgtggatcttatctcttgccgatctggcaccttgggtgccgagagcccggcgtgggcgaccgtgtggatccaggtcttgcgaccgagaagtagcttgggtccccacgccggattctccctgaaccgcccgaacagttggttgagttggcgctcgaactgataagactgggcaagcggggagagctctcgaccctgtcagcctagcggagttctgtcatgtttgggatcgggatcgatgtgagcaaagccacgctggatgtggccgtccatggagagcagtttcgccaattcagcaacgacaagcgcggctttgtgcgcttgattcggtggctgaagacgtggccgatcaagcaggtcgttcttgaggcaagcgggggctacgagcgtgctgctctggatgtattgcacgccgccggcctgccgatggtgcgaatcaatccggcgcgtgcacggcgatttgcccaaggcacgggccgtgccgccaagaccgatcggctcgatgcgacagtgctggcgcagatggcccatttgttaccgctgacccgctacgtaccgcctgccccttggcagcagcgtctggctgaatttgcgcaatgccgcaggcatctggtgcagatgcgggtcagtgagatgcagcgcttgcggcgattggtcgatccggatctgattgcgatgaagcaacgccatatagcccagctatctgacgacctgaagcaactggataaagctattgccgagcagcttgagggacagcctggctggaagaacatcggcgcgctcaaaggcgtcggccccatcctgatcagcacactggcctgcgagttgcccgaactgggcagcttgggaagcaaagccatagcatcgctggtggggttggccccgatgaaccgcgaaagtggcacctggcagggccaacggcggatcagtggtgggcgcgcagtggtacgcgaagccctttacatggcggccctgacggccatccggtacgagccaagactgcgcgcgttttacgctggcctgaaggccaagggcaaagcgagcaaggtggcgctcgtggcggtcatgcgcaaaatgctggtgatcctcaacgcccgtaagcgggacgccgaggtggccctcggctgcccctgacaagacagttgctacaaggcgtcacgccactgccaaccctcggcgctcacctgcaacacctgcgtcggctgcaacgcctgcagcaggtgccggtcgtggctgaccatcaccagcgctcccggccatgccaccagcagctcttcaagtgcctgcaacgcgctcaggtccagtgcgttgccgggctcgtccagcagcaacagctgcggtgggggggcggcatacagcacgctggccagcgcgcctttcacccgttcgccatcgctgaggtgatgggctgcacgctggatgcgctgcgcgtccagcccgagcagggccagccgtgtgcgcagttcaccggcatcggccgccgggttggcagcctgcacggtgtcgagaatgctgcgctcgccggagagccccagcaactgctggtcgagcagcgccaggggtgcatgccgttgtacgttgccactgcgtgcaggcaactggccggccaacacgcgcaacagcgtggacttgccactgccgttgtcaccaaccacggcgatgcgctggccgcggcggatgtccagctgcaacggcgcgcggcagccatgcggcagcaccagcgactcggcctgcagcaggcgtgcgctgccgcgttccccctcgccggcaaacagtgcgagctccggtgtggcgtgaaccgccgaggccgcagcgcgcagctggtctgcgctggcctgcaggcgctcggcctgtacctgctgtgcgcggccgtggctgccctctgcacgttgtttctgtcggccgagcaggatcggcgcctggttggcctgctttgcatcgcgattgccacgtgcctggcgttgctgctggcgttcttgctgttcgcgcgcactgcgctgctgctgccggtgctgggcgcgggcgtggtcgagctgtgccgcggccgcttcgcgttcggcggcacgcgcgtcggcgtagtgctgccacggcccgccatagcgatgcagcccgcgcgcgtcgagctcgacgatctgctgcatgtgcgccagcagttcgcgatcatggctgatcaccagcaggccgccgcgccactgctgcaaccgttcgtacaactgctggcgatggcgggcatcgaggtggttgctgggttcgtccaggatcagccaatcagcgccgctggcccaggcgccggacagcgccacctgcatggcttggccaccgctgaggcgcgcggcgggttgggcgggatcgaggtcgtcgggcagccgtagcgcctgccattgctgctgcaggcgctcgcgcaggtcccaacggtcgccgacgcaggcgaagtcggcctcgtccacgctgccggcttcgatgcgttgcagtgcggccagttcagcgccaacgccggccagttcaccgaccgtgccagcgggtggatagccgggcgtcggcaacaggaacacgcggccgctgccgcgtacctgcccgttctctggctgcacccggccggcgagcaggcgtgcgagcacgctcttgccagcgccattggcaccgaccaggccggtggcgaccggatcgaaggaaaacgtcagatcggaaaacagcaggcggccgtcggccagtcgatacgacacgcgatcgagcgtgagggaatgcggggtcatgcgacctccatggatgccgggttctcccctgcgcgcaggggcgggaagagtcaggccgtctgatcggaagacggcggcatcaatggcgcattggtcgcgagcctcttggaggaatgaggggccagtatagcgggactggctgaatggctgcgtgcagcggtagagccgagccatgctcggctgaccttaagcaccacgcatggcgtggatctacggcacggtacccaggcgggcgccgacgaagtcgatgaacacccgcagcttcggcagtacgtgtcggcccgaaggccacagcaggtggaaggtgccgcaggagtgcacatgatcctccagcacggtgaccaggcggccgtcggccagcgcatcgcgcaccgagtgcaccggcacgaaggccaggccgacatcacgcagtgccagcgccacccgcgcttcgatggtgttggccaccatgtgcaccggaagttcctgcggtgcttcgtcatcgggccagtggatcggccacggctccagcttgccggtgctggggaagcgatagtgcagcagcgtgtgctgcatcagttccgccggcgtgcgcggaaccccgcggcgctgcaggtagcccggcgaggcgattacacggcgcgggaacacccccagccggcgtgcgttcatccgcgagtcgctgggttcaccgacgcgcagcaccgcatcgaagccttcctcgatgacatcgaccaggcggtcgctgaaatccaggtcgaggcggatgtccggatacgccgccatgaactcggccatcaacggcagggtgagatcgccgaccagcggcaggctgatgcgcagcgtgccgctgggcgtggcgtgcggttgtgccagctcggtgcgtgcggcatcgcgctcgtcgaggatgcgccggcagcgcgccaggaacagctggccctcggcggtgagcgtgatgctgcgcgtgctgcggtggaacaggcgcacgcccagtgcatgctccagccgggcaacgcacttgccggcggcagatgcggagatgccctgcaggcgcccggtctcgacgaagctgcgcgtgtcggcggcgtgcacgaaagtctgcaggttggcgagattgtccaggactgacatcggcgtaggggcaatgaaagcggcagggtaggggcggcgtgatcacggcgggcggcgccgctaccgcaacactgtggtgcagggtggggggcgcctgctgttgcggccttgcagttccggccatcatgccgattgcggactccacggtccatgatgcccggagccgcaaccggctttttgcaccgcgccgtgctgcctaacgtggcgggcctctccccacggatcaccgcgatgaatgccgctctttccctcgaacctgcaccgatgctgccttcggtgcagcggctgctgcagcaggtccacccgacgcgcctggtcggtgcggtggtgctggtgtgcgagcacggcgtgctgcgccatgccagcgcgaccgggcaggccgatcgcgagtcggccctgccgatgcagcgcgaccagctgttccggctggcatcggtcagcaagccgctgttgagcacggtgatcctgcgcctggtggccgagggcgtgctcgacctcgatgcgccggtgcagcgctggctgccggatttccggccggcgctggccgatggccgccggccgccgatcagcctgcgccagctgctcagccacagcagcgggctgggctaccgtttcctggaagccgatgcgcacggaccgtacgcccgggccggcgtcagcgatggcatggacgccagcccggtgtccctggccgagaacgtgcgccgtatcgcacaggcgccgctgctgttcgaaccgggcagccaatggctgtactcgttgggcgtggacgtggccggtgcagtggccgaagcggcgaccggtgaaacgctgcaggtgctgttccagcgtttgctggctgcccccctgggcttgcgcgataccgcgttcgccacacgcgatgccgcacggctggccacgccctatgtgagcggcacgccgcagccgcatcgcctgcaggaaggggaggtggtcgcgccgttcgagggaacggtgggcatcgagtacagccttgcgcgtgccctcgatgcccgccgtttcgcttcggccggcgccggcctggtgggtactgccgatgacgtgatgtcggtgctggaggcgctgcgtgacgtgcagcgctccggcctgctgccgcccgcgctggcggcagagatggtcagcccgcaggtgggcgaatttgggccgccggaaccggccggctggggcttcgggctgggctttgcagtactgcgcgaggccgctgccagcggcacgccgcagcgcgaaggcacctggcgctggggcggcgcttatgggcacagctggtttgttgatccggcgcgtgggctgagcgtggtggcgctgaccaacaccctgtacgaaggcatggatggtgccttcgtcgatgacctgcgcgatgcggtctatgcggacctggaggctgcgcgatgagcggccacgccatcgatgcggccagcccggccggtgaggccacgcgcttgccgtgggcgggcctgctggcgctggccggcggcggcttcatcaccctgttgaccgagaccctgccggccggcgtgctgcgaccgatgggcgacagcctgggcgtgagtgatgcggcggtgggccagctggtgagcgtgtatgcgctgggctcggtgatggcggcactgccgatgacagcgttgacccagcgcctgccgcggcgtccgctgttgctggcggccatcgccggcttcgtggtggtcaacacgttgacggcgctgagcagcagctatgcgctgatccttgctgcgcgtttcctggccggcgtgagcggtggcctgctgtggtcactggtggctggctatgccgcacgcatggtggtgccgtcgctgcaggggcgcgcgatcgcggtggcgatggtgggatcgccgttggcgctgtcactgggcgtgccggccggtacgttgctgggccagcaggtcggctggcgctgggcgttcgcgttgatgagcgtgctgggcgtgggcctgctggcgtacgcgcgctgggcactgccggcgctgccagcggccggtgccggtcaacgtgcgtcgctggccaaggtctggcgcatgccgggcgtgcgcagcgcgctgctggtgatggtgctgtacgtgctggcgcacaacgtgctctacacctacatcgaaccgttggcggtggaggcgggtgccggcccgtggctggaccggctgctgctcgccttcggcgtggcggcgattgccggcatcgggattgctggttggggcgtggatcgccacctgcgtgcgctggtgtgggcggcggtgatcggcttcatcgtaccggtgctggccttgctggtatggcccggcgtggccagcgcgctgctgctggcgacgatcctgtggggcgtggcgttcggcgcggtgccaaccctgttccagaccgccttggcacgacgcgccggggccgctgcggacctggcgcagtcgatgctggtgaccggctggaacctggccattgcggccggcggcgtggcgggcggcgtgctgctgcaggccagcggcccgagccagctgggatggttgccgctgctgttgctggcggtgaccgtcgcgtggttgctggcacggccgaaggcgtgggcgtaggcggcgctcaacgatgatgcggtgccggccagcggccggcactaccgtgggccgcgccatcctcgcatggcgtggatctaccgagcgcagcgacccgcgtttgcttcttctgttgattccgtggtgggaccaccgccagaacctgtcagagaccgtcccggccaacgccgggatagctgtacgcgacccaccaccaggggctctgccgttggccgtcctactcgatcccttcacgctcgatcggcacgctgcgcgggttctgcatgtgctcgcgtgcagcgccgtactgctgctgccgcttgtggtggaaggcgacgaactcatcacgcggcagcggccgcgagaacagccagccctggccgaattccacatgccggctgtgcaggtaggccagctgcgcttcggtttccacgccctcggccaccacccacaggcccagctccttggccatgtcgatgatgtgcggcgtgaccgggctggtggcgctttcggtgccgatcgcatcgatgaacgacttgtcgatcttcagcgcatccagtggcagctgctgcaggtactgcaggctggagaagccgacgccgaaatcgtcgatcgccacgctgtggccggcgcggcgggcggcggcaagcatggtgcgcgcgcggtccaggtcgaggaagccacgttcggtggcctccatccagatctgctgcggcaggatgccgctgccggccatgtgccgggaaatcatcttcagggcgcggccgctgctgatgtcttcggcggcgaggttgatcgcgatgtgcgcgctgcggtcggccaccagcagctcgcgcatgtcgcgcaccacgttctcgatcaccaggtcggtgacgtcggcgatcatgccggcctcttcggccagcggaatgaacaggtccggccgcacctgggtgccatccgggcgttgccagcgcaccagcgcctcggcgccgacgcagatgccggtgtccagttcgatgatcggctggtaatgcaggtacagctcgcggcggcggatggcggtggccagctcaccgcgcagcgacaggcggcgccgcgacagccagatcaccaggccggccccggcggcggccagcagcaggccgaccggcacgtacagccatgcctgctggcggaaggcggcggccagcgcggtgcgcggcgtggtggcgatggccagccattcctcgttgcgcgcggtggcgaacagcgtggcgtgatccaggccttcgccggggtcgcgcagcagtgcctccagcaggtccggatccaggccgggctgtttggccagcaggcgtccatcggggctggccagcgccagccgcacgttcgggtcggcaatgacatcgacgaagcggcgcgggtccaccagtgcgtcgtaggacccatacaggaccgccagcacctggcggcggccgctgatttccgggcgcacatccactgcaatgcctgcgccatcgctggtgacgtggtccggcgtgggttgatccacatcggacaggaacggaccccacgaggtgcagcgcagcttgccaccttcgaagtagcccatctggtcgatcgatggggtggtcatcaccagggtctgcatgcgccggatgtgttcggggctgcagggtatgtaggcgccggcctcggccgatttcagtgccgccagcgcttcctggtaggacaggtcggagcggcgcagggtgcgatcggcgatgtcgcgcaggcgctgctgttcgacgctgatcgcgcggtcccaggtggcgtaggccatgaccgcgatcggcagcgcagcggccagcagggccagggcggtgccgccgatgatgacgcgcagccggctcatggccggcgctccagcggggcgggcggggcagggcgcatggtgggccggtccttgggcaggtgcggctatctgagcatggcgccgggccgggcggaatgggatcaatacggtattcggtcacattgtggtgaaagcggcccgctttgacgcaataggtccgtctggcgctggcgctcggcgccgcggaggactaccgtcgaatgcttcgcccgccccttttgcccgcgcccatgaccgagcccgcaacgccccccgagcacctgcgccgcagcctgtccaaccgccacctgcaactgatcgccatcggcggtgccatcggcaccggcctgttcatgggatcgggcaagaccatcagcctggccggcccctccatcgtcttcgtctacctgatcatcggcgcgatgctgttcttcgtgatgcgcgcgatgggcgaactgctgctgtccaacctgcagtacaaatccttcatcgatttctccaccgacctgctcggcccgtgggccgggttcttctgtggatggacctactggttctgctggatcgtcaccgccatcgccgatgtgatcgccattgccgcctacgcgcagttctggttccccgggcttgaagcctggaaaccggcgctggcctgcgtgatgctgctgctggcattgaacctggtgacggtgaagctgttcggcgaaatggaattctggttcgcgctgatcaagatcgtggcgatctgcgcgctgatcatcacgggcgccgggctggtggcgtggagcttcacctcacccagcggccacaccgcgtcgctgtcgaacctgtggaatgacggtggcatgttcccgatggggctggtcggcttcttcgccggcttccagattgcggtgttcgccttcgtcggcatcgagctggtcggcaccaccgccgccgaaaccgccgaccccgagcgcaacctgcccaaggccatcaactcgatcccggtgcgcatcatcatcttctacgtgctggcgctgatcgcgatcatggcggtcaccccgtggcgccaggtggtgccggacaagagcccgttcgtgcagctgttcgtgctggccggcattcccgccgccgccagcctgatcaacttcgtggtgctgacttcggccacgtcctcggccaacagcggcatcttctccaccagccgcatgctgtacggcctggccgaagagggccacgccccgcgcgggctgtcgaaactgtcgcgcgccgcagtgccggcccgtggcctgctgttctcgtgcctgtgcctgctgggcggcacgctgctgatctacctgattcccaacctggtgaccgccttcaccctggtgacgacactggcgacggtgctgttcatcttcgtctggtcgctgatcctggtggcctacatggcctatcgccgtcgctatccggagcgccatgctgcatcgatcttcaagatgcccggcggcgtcgcgatgtgctgggcctgcctggtgttcttcgccgccgtgctggtgctgctgagcctgcagggcgacacccgccaggcgctgatcgccagcccggcgtggttcgtgctgctgggcgtgggctattgggtgcgtcggaagaccgcgaagtgatccgaagtggggtcagatcccgttgcccagcaacgggatctgaccccggcaggaaaacggctgttgctgttgaggttgccggccagcggccggcactaccacgggtgcaggacgccgccctgccggcccccattcacccaacattagcgggcacggccggatcatccggccgccatgtcccctcgccccgtcctgctcgcgctgttgctgctgcccagcctgtggcccgggctggccgccgcgcgcaccgtctaccgctgcgtgcagggcaacaccgtcagcctggccaccgcgccggagccgggatcgcggtgcacgccgaaggagatcgacgacaacgccgtccagaccccgaacctgtggggcaacatgggcgtgttcagcggcgtgctgtacgagcgcgaacaggacggggcgctggtctactccacgcgcaacctgcccggctcgcgggtgttcctgaagttcaccgtggccacgccgccaggcgagccggcgcacgaaggcctgggcaaggtcggcaagccgcagctggcgcagcacgccaggcagttcaaggccgcgtccagggccaccggcgtcgatgatgcctggctgcgtgccatcgcccacgccgaaagcaatttcgacgcgctggcggtatccagcaagggcgcacagggcgtgatgcagctgatgcccgaaaccgcgcaggaatacggggtgagcgatccgttctcgccgcagcagtcgatcgagggtggcgcgcgctacatgcgcgcgctgctgcgccgctacaacggcgaccgcccgttggcggcggccgcctacaacgcgggcatcggtgcggtcacccgctacaagggcgtgccgccctacgccgaaaccctggcctacgtggacaaggtaatggcgctgtacgcacgctaccgcgaagcgatgggcatccgcaccgaagtgccggcgcgctagcggacggtgccgcctgcacgtggcgttgtagagcagagccgatgctcggctgcgccaattgcagccgagcatcggctcggctctacacaaaagctgctcagcgcgaggtggagctgctgaccaggtcgtagcgttcaatgcggccgacgcgggcgacctcggcctgcacgtcggcacgctgcttgagtgcacgccacgcggcatcgatgcgcacatcgcccggcaatgacggataggtgcgcatgtcctgcaggctggccagggtttcaccgcgttcgatgggcgagcgcagctgttcgatcagcacggcggcggcaccgtccaggttgccttcctccagcagcatttcgcgatggaacaggcgggcatcctcgcgctgggccaggatcaccgcgcgcgccgcttcgcgcgctttggcatcaccacgctcgcgggcggcggcgaactgcagcagcgcctgcgcggccttgccgtagccggcgaggcccggcatgtcattcactgcctgcgcagcgtcctgcatgcgccccagcgaactgaagacgaagccgacattcatctggtgctcgacaccatccgggccgagtgcgccgatgcgttgggcctgttgcgccgtggccagtgcctcatcggtgcggcccagccggcgcagtgcggtgagccggctgttgagcagccaggccacccattccgcttcggcggcggcaggtgattcgccgttgctcgcggcaccggccatgccctcggtcaacgacagcacttcctcgttgcggtccagcatgagcagggtggtgctgaactcggccatgcgcgcgtccagtgcacggtcgagcaggccggagacgcgcagttcatcgaggtggcgctgcgccgcctgcaccggatcgaaacgcgcatcgccgcgatcgacataacggtcgaagcgcttgtcgctgcgcaggcggatgatctcggccgggctgtcgatgcgggccagcgtggctggaatgccgtcgccacggccattgtcggcctgcagcgtggccagcgtcagccacagcccggtgggttccaggccggcacttttccagccgttgtcaaacagcgcctgcagcaggtccatgcgcttcatcggctggtcacgcaggcggtactgcaggtagttgatggcgtggtgatcgaccggcagcggcgcgtcggcatgctgcagtgcgttcaccaggaaggcggtggctgcggccggctggttgtccgacagttccaccgacacctgggtaagcaggatctgtgcatcctccggcagggcctcctgcgcccgctgcaggtagcggcgggccagggccggcttcttctgcatcagtgcggtccagccagcgacctgcgaggcgcggccacgatgctcggcatcgaagtcgtccagcaggggatcctccatcagccgttccatgctgatcagcgcgcccagcgtgttgccactgcgtgactgctggatggcctcatcccagcgcgtggcataggcctgatgcatcgcatcggcggtgattgacggcttctgcggcgccaccgtgatcgaagcagtggcggatgtgctggccaatgcggccagcagcagggcggtgagcgggagaacgcggggcatggagaatctccatccgtgggaaccgcattgaacctgctgcagccagcgaggacaagcacgacgaagcgaattctggcgttcagccgcacaatcggccgtggcggatcgcacgcgcagcgtctattgtcggtgcctcttcagacagcaggcaggcagcgcagcacgatggcacggtggcaatggatggcggcaggcgtagcgttggcgacggtagtggcattggctgcgacctggtgggagacaccgctgcatacgctggctgaaccggcgggtccggctccgacgccgttggcgtggaccgcgcagatcgaaccgctggccggcgatggccacccgggtgaccgtgatggcgcgtccgcgcaggcacgcttcgccgatccgtacgcgttgctgcgcagtgccgatggcagcgtctatttcaccgatgccggcgacaacaaccggatccgtcgccgccttcccgatggccgcgttgaaacggtggccgggcagggcgagggacgtgtcgatggccctgcactgcaggccagtttcaacacgccttcgggcattgccgccgacgcgcagggcaacctgtatgtggccgacaccggcaaccatgcgatccgccgcatcagcaccgatggccaggtgaccacgctggccggtggcgaacagggccacgccgacggccctgccgcgcaggcccgcttcgatgcgccgatgggcatcgccgtggatgcgcagggccaggtttacgtggccgatacgttcaacgatcgcatccgggtgatcggtacggatggcagcgtgcgcaccctggccggtggtgatcggccgggccttgccgatggcgtgggcgctgctgcgcgcttcgatacgccggtggcgctggccttcgacgcgcagggcgcgttgctggtggccgacctgttcaacaacgccgtgcgccgggtgggtgccgatggtacggtcagcaccgtggtcgccgccggtggcgtgatcaatgggccgctgtcgttggccaccacccatgacggcgtgctgtacgtgggtgatctcgatggccgcatcgtgcaggtgacgccgcagggccatcagatcgcgctggtcggcaatggccgcctgccgcgcctggcccgccccagcggattggcgctggatgccgatggcagcgtgctggtggccgacgccgccagctaccgcctgcatcgcctgcgcccgctgccggtgggcgacctgccggcaccggcactggtcgggccggctgccgatgccgcgctgccgaagaccgggggccgttggccgctggcaccgcaggacggctggcacgaagtggtcggcaccctgggcgaggtgcgcggcaacttcaccggtgagagccgccaccacctgcatggcggcttcgacgtgcgcggtgatgtgggccagaccgtgctggcgatcgccgaaggcaagatcagcagcccggtggccgcctggaacctgggtgagcaggccgagggcctggtcgtggatcgcctcaagtacatccacatgcgggtcggccgcaccccgcgcgacgaaccctacgatgcgcgctggcaggcgctgtacgacgagcagggcaggctggagcggatgcgcgtgcgccgcggcatgcgcatccacgtcggtgaccgcctgggcagcatcaacaaccaggcgcacgtgcacctggcggtgggtaccggcggcttcgagaccaacgcggtggcgctgggcttccagggctacgccgaccacttcgcgccgcgcatcaccgatgtggccctgctggacgacaacgaccagccgatggccgccggcagcgatggcgtggtgatggtggcgcgccagggccgcggcgtgcagatcgtggtcgaggcctgggaccaggtcgacaacaacctgccgcgccgccgcctgggcatgtaccaggtcggttaccagatcctcgatgccgctgggcagccgctgcagggttacgagcagccgcgctggaacatcgtgttcaaccgcatgccgccgcagaaggaagctgtgcgcgtggcctacgcaccggacagcggcatcaccgtgcatggcagcgcggtcacccgtttccgctacctggccaccaacaccgtgcgcgacggcctgatggaaaccgggcgctggcagccggcggcgctgccgccgggcgagtacatcgtgcgcgccagcgtgcgcgactacagcggcaacgaaggcgtcggcccgcgcgagatcagggtacggctgctgccatagccgcagccggggcgccgcaacgttcgcgctcggcgtccatgtcttccagcggccgcacttcgatgctgccgaagcgcgcccacgggaagtcgcgggcgatgcgcatggcttcgtcgcggtcgcgggcgacgatcaggttgaagccggccagcagttcgcgggtttcggcgaacgggccatcgagaacacggctgttgccatcacgcacgcgcagggtctgtgcagtgtcgaccggctgcagtttctgcgcggccagcagcgtgccttcggcctgcagcttgtcggcgtgggccaggcagtcgcgcatcagcgcgttgaattcttcgatgggcagggcctgcagcagggcaggctcgatatagatcagaagcaggtactgctgcatgggacggtcctggcgggggcgggtgcccatgatggcgcaggatggcgcgtgggcatgttgcagcgcagaagcgcgccttcggcggggacggcgaacggcggagcccctccgtggtggcgctacaacgtgatgcttgggcttggccgggtgggtaggcgggtcgggggacgccgtaaacccatccatgggggcttggccgcggcatccatgccgcggacacccccgccccgcctacccacccggccctggacagtttcctgcggcgtccaccccggaaaatcacaaacaagagcaaaagcgggtcgcttcgctcgcaaagctgagcccgccagccaaccgccgttgctgttgcttttgctgttgcttttgccttttctcttgattttcccgtggtggggcagccgcagagatctgtctggggccgggcgggtggggttggcggggtatccgcggcatggatgccgcggctaagcccccacggatgggttcacggcgtccccgccaaccccacccgcccggcccactcccagaaaaccagctttcagcgaccaacccaaacccaccacggaggggctccgccgttcgccgacctccgccgaaggcgcgctttccacggaagaaataattttcagaggacgtgtcgattcccagccccctggttcgttgtacccaatgaagggcacgcaccacgcgtccccacgggagaccgcaatgaaagtgatggtgatcgtgaaggccaacgccgactccgaagccggccgcatgcccagcgaacaggaactgtccgaaatgggcgccttcaacgaacaactggtggccgccggcatcatgctggccggtgaaggcctgcacgccacccagcgcggccgtcgcattcacttcggcggcggggcaccccaggtcgaggccggtccgttcggtcctgccagtgaacagatcgccggcttctggctgtgggaggtgcggtcgctggacgaagcggttgaatgggccagccgcgcgccgttcggcagtggcggcacgctcgaactgcgtcccttgatctccgctgaagacttcggtgaagccttcacccccgaattacagcagcaggaacagcgtctgcgtgcacagctggaaggttgacccgattcatctccacgccgggcacgacccggcgctaccgccctgaaccacatcacggagtattgccatgagactgattcccttcctcggcttcagcggccaggcccacgaggcgatggcgttctacgccaaggcactcggtggccaggtcacttcggaaatgaaataccgcgacatgccgccctccgatggctcgccgggctgcaacgagatgccgccggaaaccctggaccacgtcgcccacagccagctggagatcggcaacgccatcgtgatggcggccgacggccccggcggcggcgagggtggctcgaccaccatcaatgttgatgtcgacagcatcgaagaagccgaacgcgtgtttgccgcgctggccgaggggggccaggtgcagatgccgatcgccgaaacgttctgggcgcaccgctggggcatgctggtcgaccgctatggcaagccgtggatggtcaactgcatgaagcagccctgattcctctctttctttcatccacaaggagcttcaccgatgagtgcaccgcaaccgcagatgatcttcgtcaacctgcccgtgcaggatctgaacgcgtccaagacctttttcgcagcgctgggctacagcttcaacccgaccttcaccaatgacgatgccgcctgcatggtgatcagcgagagcatcttcgtgatgctgctgacccagccgttcttcaagcagttcaccaccaagccgatcgccgacgcacgcagccagaccgaggtgatcacctgcctgtcggcggacagccgcaaggcggtggacgtgatggtggacaaggctctggcggccggcgccagtgaaccgcagcccgcgcgcgactacggtttcatgtaccagcgtggcttccaggacctggacggccatctctgggaaatcgcacacatggacggcgagccgggctgacggccgccgcagggagaacccgcatggcttacgtggatgcttacgtgctgccgtgcccgcaggacaaggtggcggcctaccgccgccttgcccgcaaggccggcgcggtgtggaaggaccatggcgcgctgcagtacatggaatgcgtggccgacgatgtggaaccgggcaagagcacctcgttcccgcgcgccgtcaaggcgaaaccgggcgagacggtgatcgtcgccttcgtggtgttccgctcgcgcgcggcacgcgaccgcatcaacgcaaaggtgatggccgatccgcggctggcgtcgctgggcccgaaggacatgccattcgatacccggcgcatgttctggggcggtttcaagccgattgttgaagcgtgagctgcggcgcttgtgcgggccgggcgtgcgtgctgtgatcggcgcatgctcgagcccgcactgacgcagcgtctggaaaccctctggcggatggagtcgccagtgctgattgcgcgcctggcgcggctgctcggtggcgatgtcggccgtgccgaggagctggcccaggacacctggctggccgcgctggagcgttggccggagcagggtatcccggacaaccccggagcctggctgatgaccaccgcgcgcaaccgtgccatcgatgtgctgcgccagcaccagcgggtgacgcagcagcatgcgcagtggggcgaggaactgcatccggcggcactgccggcgccggatgacagccgggcactggaggacgacctgggcgatgacctgctgcggctgatgttcgtggcctgccatcccgtgctgccggccgatgcgcgggtggcactgaccctgcgcctgctcggtggcctgaccaccgtcgagattgcacgtgcgttcctgcagccggagccgaccatcgcccagcgcatcgtgcgcgccaagcgcacgctggcgcagaagcaggtgccctatgaagtgccacgcgcggacgcgatgccggatcgcctggcctcggtgctggaagcgatctatctggtgttcaacgaaggctacgccgccagcgccggtgatgactggatgcgcccggcgctgtgcgaggaagcgctgcggctggcccgcatcctggcgcatcggttgccggtgccgccggtactgggcctgctggcgctgatggaactgcaggcctcgcgcgcagcggcacgggtggacgcgcagggcgcgccggtgctgctggaccagcagaaccgcgcgcgctgggactggctgcagatcgaccgcgggcagcaggtgctggcgcgcgcgttggccatcggtggcgaccaggatccgtatgtgctgcaggcgcgcatcgcggcctgccatgcggctgcgcggcgcgccgacgcgaccgactggccgcgtatcgccgcgctctatgcacagctgctgcaggtgcaaccttcgccggtggtggcattgaaccgggtggtggcgatcctgcgcagcgaaggcccgttcgccgcgtgggcacaactgcagcccctgctggtcgacgcgcgcctgcgcgactatgcgccgctgcaggtggtgcgcggcgagctgctgcaggcactggggcgtgagcaggacgcacgtgacgcttttggccaggccgctcggctcagccagaaccaggccgagcgcggactgctgcggcaacgggcgggcctgccccccacggactgagccgacaaaggcagcacttgtcgccggccgcctgagcggctatgtttcgcgcccagcggacgcatcagcgtccgcgatccgtgcgtattgaccgaggagcggttggatgtattcaaggacgaagagcgcatcgcgcgcttttgcgcgcctgcttgcctgtgccctgtgcctggccgtatggccgctggccgtgcaggctgcggacaaatcacagcaggcctattgggccggttttgcctataccgctgacgccgccgccgtgcaggcgaccaccccgcatgcgcacgcggtgctggaacggcgtgggctggtcccgctgaaccagacgctggcacagtcgctcaagcgccacgcaccggcccacctggagctgatcgaccagccggtggcgatgctcgacggcaccaccagtgccaccgtgctggccgctgcgctggatcgcgagctggtctcggtcgaaccgatcggcgaccagtacaaggtgctggtggaagtggcgctgcaggcgttgttcttcgacttccgcgagcgccaggtgatcgcctcctatccgctcaccctgcagcgcatcgacgtgcaggactaccgtccggacaacgacgatatcgacgcgatcgtcgccgatctgctgtacggcggtgccgataccagcctgtcgcaggtactggcggccagcctggcgcaggcccggttgcccgatgccgccgtgcgtcgcctgcaggtgggcggggtgaccctgtccgacgcggcacgcgccaagctgcccgatccgaagtgggaagcaccgctgcgtgccacgcttgcgcacgaactgtccaagacgctgtcgtccaacactggcgttggcctgctgccgccggcctcgggccaggcgatcggcggtgcgatggccgcccgctttgccgacggcaaggtctaccagctgaagattcccgaacccgactacgtcatccagctgcaggtcgatgcactgaagaacggcgtgatcgaggaaaccccggcgatgaagacgatgctgttcggcgccttcttcaccgccaaggtgagcgagccgttctcgggcaaggtctatttcgaacagccgctgcgcaagggggccaccaaggtggtgccggtcacgcagtggcaggtcgaccagtggtcggccagctacgaaaccctgctggccggcttcgacgccttcgccggcgccgccgccaagcgtgccgattcgcgcgcctggctggacgaacagaagccgggcggccgcccgttgcagcagcagacccaagccctccaggagttgatcaagtcatgtcgttgatgcgtaccatcctgctcatcctcatcgcgctggcggtggcctcgccggtcgctgcgcagaccgcgagttcgcgcggtaccggctcggccagctacggcctgcgcctgagcgccgatacccgtgcccaggccctgaacaaggccaaggtcaatgccctggaggcgtacatcgccgaaaccggtgcggccaagctgcgcctgttcgaggcgcgccgcgccgagttcatcggcgagatcgaccgctacgtgctcagcgccgtgcagctgtcggacaccgaagacaagaaggccaagacctacagcgtcaccgtccgcgccgagatcaacaccaccctgctgcagaccaagctggatgcgggttcggccgtggccggcgccaccgctgcgcagcgctcgctgctgacgttcctgttcatggcgcgctcgcaggacaccgtgcagtcgttccaggacaaggaataccgccgcgtcgacgccagcagcagctacagcgagaacacccgtgaaggcgacagcttccgcggcaattcggtcagcaccaacggcagcatcaaccagaacggttcggtgtcggtcaccagcggcggcagcaccaccgcgcgcgccgacaacatcacctggaaggtggccaacgccgccgaagtcaacaccgcgatgaccggtgccttcagcgccgccggctacgaggtggttgaagccgagtacgtggaaggcgagtcgcgcggcctgctcagcatcgagcgcatccgcaaggacttcagcaccggcaacgacctggccccggccaccctgcgcgacaccgccaatggcatccgtgcggccaacatcccgtacatcgccgtcggcaccctcgacgtcggcatgcgtgaccgcgatccggccagcggcaacacccgcgtgttcgtcactgtcaccggcaaggtgctggacgtgaccggtcgtttcccgcgcaccgtgtcgtcggtcggcccggtgcagttctccggcaccggcccgaatgaaaccgtggcccgtaccaatgccctgcagctggctgccgaaaaggccgcccagcagatgatcaacgaactgaacgtcaaggcggtccgctgatccgccggcccgttgggtgccgagctcgctcggcatcgcccctgggttaccgattccccacgtgccgcacgcggccgtttcttccaaaggactctcacatgatccgcaataccgctcttgccctggccatcgcggccgccaccctgtcgatgccggcccatgccggcctgggcaagctgaaggacctggctggtggctccaccggctcctccagcagcacctccagcgccgctgccccggacgaagccgcgcaggaagcgctggtgcgtcgtttcgtcagctcgcagtcgcactcgctgcaggcccagacctcgttcgcccgtgccttcggcctggccgagcaggtgcagctgctggaagccgagcgccaggcgctgtcgtcgggttcggtcagcgtcgatgcgatgaagaagtcggtgtcggtcagcgaagccgcccaggccgcgatcgacgagcgccaggccgcgcagccggagctgaacgctgaatccaagcagcactacgccgaaggcctggtctcgctgctggcgtcggccgccgaagcgcagaagctgggtggcgaagccagcaacttcaccgccggcatgaagaacctgggcgccacccagatggctaccgtcggccgcaagctggccgctggtgcatgggtggccaaggaatcgccgggcttcatccagggcctgtacggttcgaccaagtcggctgtgaccttcgccaagaagagcaaggtcaaggtgccgtccaacgccgactcgatgctgggccagctggacaagatgaactgatccgaggcgaatccccatgcgtacgacctcccgtttgatcggcctgggcctggctgccgcgctgcttgcagcctgtggcaagcaggacaccccggccgaagcgcccgcacctgccaaggacaaggcaaccagtgcactggccagcaatgcgccagtggaagcagcgcccctgcgtggcacgccggatttcggcggcaccacccaggtcgcgcgcgaggccgacggcatcggcagcaccccggaactggcggtgctggcggcgttgcagtcggcggtggcgcaggtcaacggcgtacgcgtggccagccagatgcagagcctgcgtgcaggcctgcatgtggatgtggatgacgaacacgtcggcgatatccgcgccgacgcgttcacccagcagatgatcgccggctcgcagggcgcggtgctgggctatgaaatcctgtcgcaggacgaagtgcggcagctggatgaagaaaccatcgcgcgcgtgcgcgccagcgacgaaggctggagcttcaagggttcggcctctgccagcgcgtccggcgaggccacggccaagggcggcggagcctcggccagcgtcaaggagagctacgacgagaaggtcagcgtcgatgccaagcgtggcgcaagctcgttcgattcggatgtgacccaccgcagcatgcgcagctactggaaggtgcgcgtgcgtgcacagattgcccagtaccgcgcaccggacgagcagggcaagccgaagatcgtggtcgcgctgccgcgcaccaaggccggcagctatgccgtgggcgatggccgcgtgagtgccgatgaagtggccgacgcgatccgcgcgcgcctgtccgacacgctgacccagacccagcgcttcatcgtgctggatcgcgagttcggcgacgaactgcaggccgagatcgaccatatcaacagcggcaacgtacgcctgcaggacaccgcacgcgtcggccagcagctggcgaccgacctgatcctgatcccgaccatcgaacgcttcgagtacccgcgcagcgtgcgcaacctgcgcatgtccgaccgccaggtgacctcgtactccggtggcggccgcatcaccctgcgcctgatcaacgccaccaccggccaggtggtgatgtccgacagcttcgaccaccagctggcctcgaccggcccgagcaccctgccccgcgtggtcaacggccgcaacatggccgcggcgatgatggaatcgctgtcgggtcagatcggtaccaccatcgtcaccacgctgttcccggtgtcggtggtttctgtggacggtgaccaggtggtgctgagccagggtggcgaaaccctgcaggccggacagcgctggcaggccgtgcgcctgggcgaggaactgaaggacccgcagaccggccgctcactgggccgcagtgaacacccgtgctgcaccatccgcatcgaccgcgtggccgcacagacctcgtacggcaccatcgaagacggcgtcgacgcgatgcgcggcggtttccgcccgggccagatcgaactgcgccagaagctgggcagcaagccggccgccgccgcaggtgcgactgcctcggccgctcccgccgccgccgcacgcccggcggccaagccgaagcccaagcccgctgccgccccggccgaagacccgaactggtaacacgcccaagcaacacaccgatggggtcagagcccttttccggcgggaaaaggatctgaccccttcgtgtttccgtgcgtgtcgacccaggtcgacacccaccaacagcagtcggaccccgcctacgctcaggaaaccagcttttgctgttgcttcggctgttgccgttgtttcggcaggtgcagggcgcagccctggcgaatcccattacactccagaaggatttccctgctggagagagcaatgaaacgagtggtactgggcgtgctggccctgtcggtgtcgagcgcactgatggcggccaccccgaaattcgatggcgcgcggatctccgccgacgtcaaggaactggcctccgacgcctacgaaggccgctcgccggccaccgccggcgaagaaaagaccatcgcctacctcagcaggcagtttgccgacgccggcctgcagccgggcggcgacctcaaggacggcaagcgcctgtggacccaggccgtgccgctgcgcaagggcgacatcgtcggcgcaccgcagctggcgctgcaccagggcggcaagaccctgccgctggagcagggcaagcagatcgccgtgcgcgccgccatgaacggcgccagcagcgtcgacatcagcaaggccccgctggtgtttctcggctacggcgtgaaggcaccggagcgcaactgggacgacttcaagggcgtggacctgaagggcaagatcgccgtggtgctgatcaacgacccggacttcgaaaccggccagggtgatttcgacggcaagggcatgacctattacggccgttggacctacaagtacgaggaaggcgcccgccagggggcgctgggcgtgctgatcgtgcacgagaccgcaccggcgtcgtatggctgggccaccgtggccggctccaacaccaacaccatgttcgacgtggtgcgtgacaacccggcagaaagccacccgctgctggaaggctggatccagcgcgaccttgccgtggagctgttccgctcggccgggcaggatttcgaggcactgaagaagaaggcgcagcagcgcgacttcaccccggtggcgctgaccggcgccagcctggacgcgaagtacgcggtgaagaccgaagtgatcacctctcacaacgtggccgcgcgcctggaaggcagccgccatccggacgagaccatcatctacagcgcgcactgggaccacatcggcgtgggcgagccggacgcgcgcggtgaccgcatcttcaacggcgcgctggacaacgccagcggcaccgcctcgctggtcgagctggcccgtggcttcgccaaggagaagcgcccgcagcgctcgctgctgttcctggcggtcaccgccgaggaaaagggcctgctgggttctgagtactacgccacccatccgctgtatccgctggaaaagaccgtggccgtgatcaacatggacggcatggcgccgttcggcccgtcgcgtgacttcggcatctacggtgccgcgcgcttcgagctgctggaccagctgaaggacgtggccaagggctgggatatccgctacacgccggacccgaagccggaagcgggcctgttcttccgctccgaccacttcccgttcgccaagcgtggcgtgccggcgctgtcctggtcggccggccaggactgggtggacggtggcgtggccgcaggcaagaaggcctccgaggactacaccgccaagcgctatcaccagcagggcgacgagtggcagccggactgggtgtttgccggtgccgcgcgcgacctggaagtgctgtacacgctgggcaaccagctggccaattcccgcgattggccgaactggagcaaggacgaggcgttccgcgccgtgcgtgacgccagcgccgaccagcgcaagtaacggcgtccggtagtgccggccgctggccggcattgccgcccccggaaacgccgggccgtgcccggcgtttccataacggcttccatcccaactttcccggccttcgtcgcagcctgcttgcttgcccggcgggccgccctatgctcggctcacccccttcctcaaggcgccgccgtgttcgccagcctctctctcctgatccgccacctgctggcctgggctgccgcgctggttgtcgccggcatggtctggagcggcatcttcagcggcatgaacgatggcccgggctggatcttcgggctgctggcgatgttcctgatcatttccgcgctgggcagtgccatcacccacatccgccgggtctggctggtggccggtcgcctggatgccaccaccctgtccggccgccagcgccgccagatcgaactgccgatggacgccggccacgccttctcggtggtggaggcggcgatttccgaactaccgcgcgtcgaagacgtggaaagctcggccggcagcctgcaggtgcgcgcctatgtgcgccgggtcgacctctggaacggccgccagccctcgcgctggaacctgccggcgcggctggccatcaagcgcaacagcgtgctggccacggtcacgccggggcagggcaccagcaccgtgaccctgctgttcgaacccgatgccggctggtgggccgacctgctggcgctcgacgagggcagcaacttcgagaacgccgaagcagtcacccgtgcgatcagccgccgcgtcgccgaccagcgccgcgacgaacaggctgcggccgaacagacccaggtggaaaaggaactgtcggtggcacgcttgaacctgttgcatgcgcaggtggaaccgcacttcctctacaacacgctggccaacgcgcaggtactgacccgcaccgatccggcgcgtgccgaacagatgctcggccacctcattcaatacctgcgcagctcgttgccgcaggtggacgaatcggtatccacgctgggcgtggagctggaccgcacccgcgcgtacctggaaatcctgcgcatccgcatgggcgcacgcctggcggtggaaatgcaggtaccgaacgaactgcacggcgtgcacctgccggcgatggcactgcagacgctggtggagaacgcgatcaagcacggcctggaacccaagcccggcggtggcacgatctggatactggcgcgcggcttcgatgaccacgtgaccgtgaccgtggccgacgatgggctgggcttcggccaaggcaccagcggtaccggcatcggcctgaagaacctgcgcgagcgcctgcgcctgacctgcggcgagcaggccggcgtggcgatcgttgccaacttccccagcggcgtggccgcgaccatgaccctgccgcagtcgcccaaggagtgcagccatgccgcttgaagccctgatcgccgaagacgaagaactgctgcggcagtcactggtggagcagctgggccggttgtggccggagctgaagctggtggccgagtgcgaggacggtgccagtgcactggagcagctggccgagacgcagccggatatcgcttttctcgacatccgcatgcccggcatcagcggcatcgaggtcgcgcgctcgctgtccgagctgagcccgcgcacccaggtagtgttcgtcaccgcctacgaccagtacgccatcgatgcgttcgagcagggcgcgatggactacctgttgaagccggtcagcgacgagcgcctgctggccacccgcgagcgcatcctgtcgcggctgccatcaacgcgacaggacgatgccgtgctggagcgcctgctgcagcggctgggcccgtcgcagggcgcagcggagcgcccgccactggcctggatcaccgccagcaacggccgcgagacgcagctgatcatgctggaagatgtggcctacttccgcgccgacaacaagtacaccaccgtggtcaccgctgccggcgaaagcctgctgcgcacaccgttacgtgaactgcttgaagtgctcgacccgcagcacttccgccagatccaccgctccaccatcgtcaacatgaaggcggtggcagcggtgagccgcgacgacaccgggcgcggcgtgctgcgcctgcgcgggcgcacggagacgctggtggtcagccaaccgttcatgagcctgttccgcggcatgtagccgcgccgcagtctccgccgccaggagcattgcatgcgttttttcctgcttgtcggcctcgccgcattggcgcttgccggttgccggaagtccactgaaaccgcgatcacccgcaccactgccaatggcgtggacacgctgtacagcaagcgcacggtagtggacggcgtggcgcgtttcgagtgcatggccagccgcagcggccagtgccattacctggtgctggacccggcctgtcgtcctgatgccgcctgtgcgaaagcgccgatacggtcgttcgcgttggcggccggcacgacccgggagttcaggggcctgccgaagggcttcgcccagtgcgtcagcgaggatcggaaagaacaatgccaccgtgagtgatcacggtggcattgtggctccccccgcttccctgaagggtcagtaggcaggctgtagtgtcaggtcgtggtggtgctcgttctcgcccacgtggttgaggcggccgaccagttcggagtgctgcttcatgcgcccgatctcggtcatgatgcggatgtcctcgtggcgcagctcgcgcttggcggtgaccgcctgcttgtaatcgagcacttccggataatgctcggccaggtccagtgcctcggccacgtgctcgacgctgtcggccttggagctgatgcgtgcgcggctgttgaacgccttcatccagcgctcgaaaccggcctgctgatcgaacatgttggccatgaaccagatcacgaacaggatcgagacccacgagccaaacacgactaccacgcgggtgaacgtgatatggaagtcgtcgcgccagaggtagttggcgatcaggccaagaatcagcagcgaggctgcctgccagccgacgatcgaggcgatcagccattggcacttggcctgggccagcaccgcgacttcatcgcggatctgctgctcgctgagattgcgccaatgcgcgacctgtttgtcgaacgggctgctgtagagctcgttgtcgcgaagcagaattcccaaacccttgaacaaagcaatcatggctggctccttgtggaacgtgcgtcgatcagcattggacggtgtggcggttccagttctagcacttccagcgagccgtgcaatgggcgcaatgccaagctgcgcaagggctttccctgaatcggtgaatgttgttgcatcgcagcatcgaagccgctgcctgcgacaggatgtcgcagggtgaaatgtgctgcggccgcacatgaaaccgtggctgagtacgaagactcgccgccggcgtcgtgatcgcccagaatcggggccgaccgcgcaacttgcggccattctttcgcttttcctggaccagtgatgccggctctgctgcagcgactctcccgccccgtcaccgcgccgatccggcgctgggtgctggaggccttcccccgtggccagagcggcatcgattacgaccagccgctgggtgacccgggttggtttggacccgacagcgtgacctggcgcctgcacgccgagttcccctcgatgctggccggtggcctgtgcgcgctgatgctgcagaccctgcatccgcgcgcgctggccggggtctacgatcactccaatttccgccaggacctggtaggtcgcctgcgtcgcaccaccgcgttcgttgccggtaccagctatgcgcccaccggcgaggtggaggcgctggtggccagggtgcgcggcatccatgcacggatccgcggccagaccgcacagggcgaaccctacgccgccgatgatccgcagctgctgacctgggtgcatgtgaccgaggcgttcgggttccttcagggcttccgccggtacggacgggaggtgccggcacacatcgccgaccgttactacgatgagtaccgctgcgtggccgaggcactgggtgcggtggacgtgccgcgcagcgaagcggaagtggcggcgtacttctgtgcgcggcagccggagctgcgcgtcgacgagcgctcgcgcgaggtgctggaggtgctgtccggcgtgcgcctgccggtaccggtgccggggctgtcgcgcgaagtgttcctgggtgcaggcgcggcactgctgccggactgggccgaaggcatgcttgaacgcagtggccgtcagcgcgcgcaggccgccgcgtcggcgaagctgatgcagggcatggcgccgctgtttcgccgtgcgttgcccgatggcctggccagccgcgcctgcgcgcgcatgggcgtgccggtgtcggtgctgcgcgagtggcccaccgttccccggtaggtgccaaccttggttggcacgcgttgcgcgcggtgccgcaggagcgccaaccaaggttggcctctacccgagcggatgccgcagtagatccacaccatgcgtggatgggccttaccccgccgacttcaacccgcgcaacagcatctccagcgccgccgtcgcctgccgcagacgcacgtcgccatcctcgccctcggcgatccagaacgcggcctcggccaggctgccatagatcagcgacgccagcgcctgcgcattcaccggcgccaccacgccctgggcaaccagatgttcgatcaggtgctgcatcgagtgcacgcagtggcgctgcgattccggtgaggcgccaccgagcaccgcgcgcgcgtcgcgcagcacgatgcgctggatctccggttccagcgccatctccaagtacgcgcggcaacgctgcacgaagccctcccaggcatcgtcggcggcatcactgatcgcctgcaggcgctggtcggtctcggcatcgagctgggcgacgacagccgccagcagacccttcttgtcgccgaagtggtggtacagcgcgccgcgggtcagcccggcctgggcggtcaggtcgtccatcgaggtggcggcatagccatgctcgctgaacacccggcgggcggtggccaggagggtggcgcgggtttcttccatctcggcgcgggtgcggcgaaccattcagagctccttacatacatagtgcatgattatttacatacggcgcgtatgaatgtagcctcttattcatacgccctgtatgtattgtcatggcgccccgtgcgccaggcaagtcgctgccttggagaacctgatggccaccccctatcgcgacctgttcgcgacccccggcaccgccggcctcgccctggccgggctgctggcacgcctgccgctgccgatgaccggtatcggcatcatcaccttgctgtcccagctgcgcggcagctatgcactggccggtgcggtgtcggccaccttcgtgctgacctatgcgttgctgtcgccgcaggtgtcgcgctgggtcgaccggcgcgggcagggcagggtactgccatgggccactgcggccagtgcggccggtctgctgttgctgctcgcgtgcacgctgctggccgcgccggactggacgctgttcgttgcggcgatgctggccggctgcatgcccagcgtgtcggcgatggtgcgagcgcgctggaccgcgacccatcgcggacgaccacagctgcagaccgcgtattcgctggagaccgtgttcgacgaggtgaccttcatcgccgggccaccgttgtccgtcggattgtcggtggcgatatggccacaggctggcgtactggcggccgccctgctgctggtggccggcgtcgccgcactggtgctgcagcggggcaccgagccgccgatacagcactacgaaggtgcagcatcctcgcactcgctgctgcggcaaccggagatccgcctgctggcgttgctgatgctggcgatgggcgtgatcgtcggcaccgtcgacatcaccagcgtggcattggccgagctgcgcggacagccactagctgccagctgggtgctgtcggcctacgcgctgggcagctgcgcggcgggcctgctgtttggtgccctgaagctgccgatgccgctgacgcgcctgttgctggccggagcagcggccaccgcattgaccacgttgccgctgctgtgggtcggcagtctgccggcactggccgctgcggtactgctggccggggtgttcttcgcgccgacgatgatcgtggcgatgtcgctggttgaacaacgcgtgcccgaagcacgcctgaccgaaggcatgacgtggctgctggccggcctcaacatcggcgtggcgctgggcgcggcgctgtccggacagagcgtcgatgcggcgggcgtgcgcagcggttttgtggttgcgctggcggcaggcggtggcgtgctgctgttcgccttgctcgtgcaacgtgcgctgcgcccgtctgccgcgcccacatctcctgaaggaatcatcccgtgagcgcttcatcgcctgcgcatgccgcgtctgtgccccgccatccgtggtgggcggtctccgccgtcggcctcgccacgttctcggtggtcaccaccgaaatgctgccggtcggcctgctgactcccatcgccgaagatctcggcgcgtccaccggcaccgccggcctgatgatctcactgcccgccctgctggcggcagtgttcgccccgcttgcggtgatcgcagccggtggcatcgatcgtcgccgcatcctgtgtgcgctgttgggcctgctgctggtcgccaaccttgcgtcggcgctggcacctggcatcggctggctgttggccgcgcgtgtgctggtggggttctgcatgggcggcatctggaccattgccggtgggctggcagcgcgcctggtacctgcgcagcgcatcggtctggccacctcgatcatcttcggaggcgtggccgcagcttcggtgctcggcgttccgttgggcgcgctgatcggggatgcattgggctggcgcagcgcgttcgtggcgatgacgttgttcagtgcggcggtgatgctgctgcatctgcgggtggttcccgcgttgccggtcagcacatcggtgcggccgcggcagttcgtgcagcagcttggccagcgcaacctgcggcgtggcctgtggctgaccgggctgctggtgtccgggcacttcatcgccttcacgtacgtgcggccgctgctgacgtccgtatcgggcgtggatgcgtcgtggataggtgcactgctgtttgggtacggcctggctggcatcgccggcaacttcatcgccgggccgctggctgcgcgccatccacggggcatgctgctggcgatagcctcgggcctgctgctgacgcctctgctgttcctgtgggtgggaaatacgccctccgcaggtattgcagtgctgctgctgtggggtctggcctatggcggtgtatcggtgggcctgatgagctggatgatgaaggcggtgccgcaggccgtggagatcgccaccgcgttgtatgtggcggtattcaacatcggcatcgcaatgggtgcgtggggtggtggccgcctgctggatggcgtgggcctgcatgcgaatctgtgggctgcggcggtgttggctgggagtgccctgctgatggctgccatcacccgcaggtagatccacgccatgcgtggattcctaccccgtgccgaccaaggtcggcacccaccagagcggagtatgtgccgacgaaggttggccgctacccggaaatgaaacgggcgccttgcggcgcccgttccggttacatcaccacaccttgacccgcttgtccggggccaggtacagcttctggccttccttcacttcgaacgccgggtaccaggcgtcgatgttgcgcacggtcaatgcgcggaactggcccggggcatgcacatcggtcagcagcgaattgcgcagcgcctgctcgcggctcttgctgcgccacgcctgggcgaagccgaggaagaagcgctggtccgggctgaagccttccagggtctggcccggcttgccctgcagcgacagctggtaggcatcgtaggcggtacccaggccagccacgtcggcgatgttctcgcccagggtcagcttgccgttcacgtgcacgccggggaacggctcgtagctgctgaactgcgcggccagcgcatcaccggcggcgttgaactgcttcaggtcctcggcggtccaccagttgtgcagcttgccggtctcatcgaacagcgcgccggcgttgtcgaagccgtggctgatctcgtggccgatcaccgcaccgatcgcaccgtagttcaccgcgtcgtcggcagcgccgtcgaagaacggcggctgcaggatcgcggccgggaacaccaggcggttctccagcggcacgttcatcgcattgatggtctgcggcagcatcgcccactcgctgtggtcgaccggcttgcccagcttggcgatgttgcgctggtactcgaacagctcggcgcgctgtgcattgcccagcggatcatcacggcggatctccaggccggtgtagtcgcgccacttctccggatagcccatgcccacggtcaggcccgtgaccttggccttggcatgcgccttggtctgcggcgacatccacgacagcgcgtcgatgcgcttggcaaaagcggcgatgatgttcttcgccatctcgtccgcacgctccttggtcctggcgtcgaagtgcttttcgacgtagcgcttgccgatcgcttcgccgacggcatggttggcatcgtccaccgcgcgcttccagcggtcgctctgctgcggcgtgccgctcagcgcggtgccatggaaggcgaaccgggcatcggcgaacttcttcggcaggtaggcggcggcacggtccagcgcgtggaacgccaggtagtccttccaggcgtccagcggctcggtggcgaccagcctggacaggccggccacggccttgggctgccacacgatgaagtcctgctggttgcccagcgcggccgcatcgaggaaggcgttccagtccaggcccggcgcctttgcattgaagtcggcctgggtccaggggttggcgcccttggtcacgtcgttggtttcttcctgggtggcatgcgcctgcgcgatcttcgtttccagcgcgaggatgcgctgcgccttgccggccgggtcggcgacgccggccagctgcagcatctgtgcgatgtaggcctggtactgcttgcgcagttcggccatgcggccatcacccaggtagaaatcgcggtcgggcatgcccaggccgccctgcaccaggtacggcgcggtgcgatccggctgcagcatgtccaccgacacccacaggccgaacaggcggtcggtgtagaagttggtggcgttgagcaggtcgacgtcggcgcgcaggtcgccgccgagtgcgcgggccagcccggccttgtcggcgatcgcatcgatggccttcagctgcggctgcaccggcgccagaccgtgctgctcgatgccggcttcgtccatgtaggcggcgtagtagtcgccgatcagcttgtcgtcgccgctggcctgggtgttgccggcggccccttccaggatggcgcgggtgtcggccagggtcttctcggcaatgacattgaagctgccgaagcgcgagcggtcggccggaatctcggtgttcttcacccaggtgccgttggcgaagccgaagaagtcgtcgccggcggcgatgttgcggtccatgccgctggcatcgaagccgaaactgcccagcatcggcttggccgcagcgggggcggcatcggccggcgcggtggcaccgacggccgggtcggccgggcggtcacaggcggccagggacaggctggcaacaatggccagcgccagggtgggacggcgcagcttggacatggacttctcttgcagcggaaaaccccaagtctaatccgctccggcgccactggccgcccccctgcggggcccgccctgtgcaggatctggctgaacgtgcggatgcgatcttcacgccgtcaccggggtggtgcatgctggaccctcgagccctgcgcggacacggggaggtggccatgcaggatggggtcaggcgtcaagaatggcgtccgccggccgttgaggtcggggacgtggaggattcgttcgcgcatgaagccagccgactgcacaaggaacatcaaccgatgcccgcgctgaaacgggcgttggcccggccgctgcgcgccatcacctggggcggtgtgctgctgggcgtactgctggtgaccggtctggccctgatgctggtcaacgaccaccaccgccgcctggaagcggcgcagcggcagagccgcgcgctggcggtgggcagcgagcgcctgctggcgctggagctgcgcaacctggagcgggccatgaccggcatcgccgccgacgccgcggaactgttccgcagcgtgccggcacaggcgccggccttgctggatgcctccatcggcggcgtgctgcgccggcacgccgaactgcacagcatcgtggtgctcgacagctatggccgcgcattgacggccggcaagggcgacctgcagttgccgttgtggaccgatccgcaacggcgcggctcgggcagcgcgctgtacatcggcccaccacagcgcgccagcgacgggggctgggtggtcccgctggcgctgccgatggccgatgggcgctggctgctggcacggctgcgctgtggcgaactgcagcgcatcgtcggcggcctggatgtcggtcccaacggattggtctcgatcagcgatgcccagggctacatgctggcccgcgtacccgatccgcatggcacggtgggccgccgctatgacctgccgcgccgggacctgctcggcacgcaggcagtggtcgagctgggcagcatgcccggcgttgtcgacggcgtgccgcgcatcctcaccatcagcacgctcgaacgcagcccgctggcggtgcaggtcggcctggccgacgaagatgtactcgcaccgtggtggccgtacctgaaggcgtcggtggcgatcgtactggcctacatcgcggtgttgctggtactgctgtacgccgtgcgccgcagcacccgcagccaacaggcgatggccgaggaactgaagacgggccacgccgagctgcgcctggcgcaccaggtcgggcgtgtctgcacctggtacgtggatgaggacgccgcgctgctgcgctggtcgccgctggcccgcgagatctttggggtacagaccgacgccttaccggtcgcggatttcttcgcgcgcgtgcatcgcgatgatgccgcgcgcctgcagcaggcctttgaccaggccttcgccggcagcgctgtgctcgaccaggtgttccgcctggtgctgcccgggggcgaggtgcgctgggtcggcgcgcgcgggcagcgggtggaagtggccgacagcgagcggcgcatgatcggtgcgctgaccgacctgagcgaacgctatcaggcgcgcgagcagatgagcgaagtggaacgccgcttccgcctgctgttcgaccgcaatcctgcaccgttctgggtgttcgacccggatacgctgcgcttcatcgaggtcaacgacgctgcagtgcgccagtacggctacagccgcgacgagttcctggcgatgagcatcctcgacatccgcccgcgcgaaggctgggacgaagtgcgtggtgccatccagcgggcgcaggtgggcgatccccccgacgcgaccgtccgcctgcaccggcgcaaggacggcagtgtgttcgaggtgcgcgcacacctgtccaagctcgacttcgacgggcagcccgcgtgcctggtgctggccgaggatgtcagcgagcggctggcctacgagcgcgacctggcctatcaggcacggcacaacccggccaccggcctgctcaatgtgcgcgccctgaccgaacagctggacgagcaggaggagggctacaccatcgccttcgtgcagctgcgcgggctgcagctggtggccgatacgctgggccgcgagatcggcgatgcggtgctgcagtcgatggcgacccggctcgggggcctgggcgcacgctgtggcacgctggcgttccagccggccgaggatttcgtcttcgccatcggtgccgagcacgatacccagcgcgtgctggacgacctgctgcagatcgtgtcggcgccgatgcgcggcaaggactcgctgcaccagttcgagccgcgcatcggcgtggccgtgcacatcgctggtgacgggcacacggccgagcaggtgatcggcatggccgcgcaggccgcgcatgcggcgcgcgccgagggcaacgtggtggtctggttcgacgcggccgtgaccacgcgcctggccgaccgcctgcgcctggccgggcgcatccatgccgccatcgacaacgaattccagctgtatttccagccgatccggcatgccggcgatggcagcccggcagcgctggaggcactgctgcgctggccgcaggccgatggcagcttcatcccgcccaacgagttcatccagctgtgcgaggacaccgggttgatcctggcactgggccgctgggtgatccgcgcggcggcgaaggcgcagcgccgtctggtcgaggccgggtggggtgagttgccgatcgcggtcaacgtgtcggcggttcagttcttcaacagcgacctggtggccgaattcacccgtgcccagcaggatttcggcctggcccgtggcgcgctgcacgtggagctgaccgagagcagcctgatgcgcaagccggcacaggcgatgcagaccatgcagcgcctgcacgagcagggcatccgcgtgtcgctggatgatttcggcaccggctattccagcatgtcctacctgcagcacctgccgctggacatcctgaagatcgaccgcagcttcgtcgccgacgtggaaaccaatccacgcaatgcctcgatctgccgcgcgctgctgtcgctgggccacagcatgggcctgaccatcatcgccgaaggcgtggagacgccggggcagctggactggctggctgcgcatggctgtgaccaggtgcagggctacctgttggggcggccggcgccgctggagcggatcatcgacgcgctggatgaagtccctgcctgatcgggggcttcgtatttgccggccagcggccggcactacccgaccgaagcatgacgggggttcgtatgtgccggccggcggccggcacacccgaccgaagcatgacggtagtgccggccgctggccggcattcgcccaagaccgggatgtgtctgattgccggccggcggccggcactaccggcaagcgccagactcggctacaccccggtgtccaccagatggtcgatgaaactgcgcaccttcggtgccaggtggctgcggctggtatagaccgcgaagatgccgatcggcgaggcctcccattccggcagtacgcgcaccaggcggccatcggccagcgcgtcttccagcaggaagtcgggctgcaggatgacgcccatgccggcgatcgccgcttcacgcagcacgtcgccgttgttggcgtgcagcaggctgttcaccgctactttcacttcgccgcccggcccctgcagcggccagtggtcaccggcggcccagtagctgtagcccaggcacgcgtgcgcctgcaggtcgtgcggggtctgcggggcgccgcgtgcggccaggtaggccggcgcggcgcacaggctcacccgcgattcgcccaggcggcgggcgatcagggtggggcccggctcgcgggtgatgcggatggccacgtcgtagccttcctcgaccatgtccaccaggcggtcggacagggccaggtccagttccacctgcggaaagcgttcgcggtaactggccagcagtggaccgaggcgggcgatgccccaactgaccggtgcattgatgcgcagcatgccggagggctccagcgcctgcgcgccgatgctggcctccagcgcgtcgaactcggccagcaggcgcacgcattgggcgtagtaggcggcgccggtgctggtggggctgacccgccgcgtggtgcgatggagcaggcgggtggacaggcgcttttccagtgcggcgacctggcgggtaacgccggcggtggacatgtccagggcctgggcggcggcgctgaagccgttgcgctcgaccaccgccacgaacacgcgcatcgcctcaagggtgtccattgttgcgccttctgaaataaatacggtcaatcgatcgtatttatcggcccgtgaaggcgcaataacctgagcccactcccttcaaggtgctttccgatgcacgccacgaccgctcctgtttcgccgctggccccgtatggcgccaccctgctgcgcctggccctgggcatgctgctcctggtccatgcgctgaccaagctgctggtattcaccccggctggcacggcagcgttcttcgagtcgctgggcctgcccggcgtgctcggctacctcaccctcggcgtcgagctggcgatcactgtcgcgctcctgctgggcatctatgcgcgctgggtgggcctggtcggcgtgccgctgctgctgggcacgatcgtcaccgtgcacggcgccaacggcttcggtttcgccaatgccggcggcggctgggaatacccggcgttctgggcgctggcgctggtggtgctgttcctggtcggcgatggcaagtggaccctgcgttcgcgctgatcgccgcctgatcctgcaactggagaattccatgtcccgcctgccttcgctgtacatctcccatggttcgccgatgaccgccctgcatccgggccaggtcggtgtgcgcctggccgagctggcgcgcgacctgccgccgccgcgcgccatcgtgatggcctcggcgcactggctgggccggcagccgctggtcggcgcacatccgcagccgccgacgatccacgactttggtggcttcccgcgcgcgctgttcgaactgcaatacccggcgccgggtgatccggcactggccgaagaagtggccggccgcatcgccgccgcaggcctgacagtggccatcgacccgcagcgtggcctcgaccacggcgcgtgggtaccgctgcggctgttgttcccgcaggccgacatcccggtggtgccggtgtcgatccagccgctgctcggccccgagcatcagttcgcgctgggccgcgcgctggcaccactgcgcgaacaaggcgtgctgctggtcggctcgggcagcatcacccacaacctgcacgactggggcgactaccaggacggcaaggaagcgccatacgtgcggcccttcatcgagtgggtggagcagcggctggccgctgatgaccgccaggcgctgttcgattaccgccggcaggccccgttcgccgagcgtgcgcacccgaccgacgagcacctgctgccgctgttcttcgcgatgggagcggccggcgagggcggtttcggcgcacgccgcatcgacgccggcatcgatgccggcttcctggccatggatctgtaccggttcgacggggcatgagccggggctgacgcgcggcggccccggccgtcgcggtcagggccgcatgtggtagttttttccgggtttccggcgctggccctcgtgcctccccacgcgccgcttcctggaagaagcatgcataccattgaagtcgtcctggcgatgctggtggccgttgtcgccagcggctacctggttcgcgtcctcccgttctcgctgccgttgccgctggtgcagatcggcctgggcgcggtgatcgccggcgtgttcaaccgcggccatgcgctggagccggaagtgttcttcctgctgttcctgccgccgctgctgttcctggatggctggcgcattcccaagcagggcctgttccgcgacaagggcgcgatcctcgaactggcgttcggcctggtggtgttcaccgtgatcggcgccggcctgctgatccactggatgattccggtgatgccgctggcagtgtgcttcgcgctggcggccatcgtctcgccgaccgacccggtggcggtcggggcgatcgcctccaaggcaccgatcccgaagcgcctgatgcacatcctggaaggcgagtcgctgctcaacgatgcgtccggcctggtctgcttccgtttcgcggtggccgcggtgatgaccggctccttctcgctggccacggcctcgctgaccttcctgtgggtggcggtggccggccttgccgtgggcgtggcggtcaccctcggcgtgtccaccttccagcgctggttgtggcgccgcttcggcgaagagccgggtgcggcgatgctggtcaacctgctgattccgttcgcggcctacctgctggccgaagaaatccatgcctcgggcatcctcgctgcggtcgccgccggtatcgcgatgagctacgtcgagctgaccggccgtgtctccggcagcatgcgcgtgcagcgcgcgggcgtctggaacatgctgcagttcagcttcaacggcatcatgttcgtgttgctgggcgagcagctgccgggcatcgtcgagcgcgccaccaccaccatgaacgagtccggccaccagagtgcatggtggctgctggtatacgtggtggtgatcaacctggcgctgatcctgctgcgcctgctgtgggtatggctgtcgctgcgctggaacctgctgcgcgcgcgccgccgtggcctggagcggggcgaggcgccgaactggcgcatcgtggtggcgacctcggtggctggtgtgcgcggcgcgatcaccctggccggtgtgttgaccctgccgctgttcctgcccgatggcagtgcgttcccggcgcgcgacctggtgatcttcctggccgcggcggtgatcctgttctcgctgatcggcgccagcgtggcgctgccgcagctgctgaagggcctgcagctgccagccgattcgggcgagcgcaaggaagaggacctggcacgcaagctgtcctccaaggccgcgctggccggggtcgaacgcatgcgccagcagctggtgatgaaccagaacaccgagaacgtgcagctgtacaacgatgctgcctcgcgggtgagcctgctgtaccagcggcacctggagaaagacaacgacggccccgacgtggacccggagaaggtgcggcgcatggagctgggttaccgccagctgcgcagcgcgggcctcaatgccgagcgcgaggaactgttccggttgacccggcgcggggtgatctccgatgagatctcgcggcgcctgatccgcaacctggacctgctggaatcgcgcaagcgcgaatgacgcctgggccgggcgttgctgacgctgacgcggattccgccctgccatgtagagccgagcccgtgctcggctgcgcttgcttcaggcgtcgtgaacccggaacgaaaagcagccgagcacaggctcggctctacatgccggtgccggttattccggcttctggtccaggaaatacacctcgaccttgcccttgaccttgatggtcatcgggttgccgcggcggtcgcgggccttgccggcctgcacgcggatccagccttcgctgaccgagtattcctcgacgttgtcgcgctcgacgtcgttgaaacgcacgccaacgccgcgctccagcgcctgcgcatcatggaaggggctggccgggttgatcgccaggtggtcgggaggggtatcgctcatcgcttcattcacagtgacggccaccaaggccggcttcagcggcacaggataaaccgtagaatgcgggcctgccccagaggacgttccgccatgcccgacaacagcgactatttcgacttcgaggaagacatccacgacttcgacgaagatggcttcgaggcgcgggtctggaacctgctggtgctgatcaacccgggcgacgaggaactggccctgcagcagttcaaccgctggcgcgaacacctggccgaggacgggcagccgctggaagcggacagcgactggctgccggcgctgttcaccgccatcgcctggcagtccggtttcgatgtggagcgcgatgacctggaatcgctgcagtcggcggtgaacgagctgtcggcgcgcttcaacctgcaactggactggggcggcgacctggacgacgaggacttcgccgagggcctggacggcgtgcagctgatgtccaccgccttcgaccgcctgcgcgagcacaactacacgctgtggagcgtggatgccggcagcgacggcttcaccggcgtgatggcgctgacccgcgacgacgacgcgatgctggcgctgtgctcgctgctgaacgtggaaatccggctgggcagcgacccgttctgagcgatgggccgatccgccgggcacgacccggcggggacggtctgctgggcgcggcctacggccggtactgcgcccgggcgttggcgatcacggctttgaccagctcgcggtcggcgtgccgcgaaatcgcccgcgcgccgagcgcgatcgcctgtgcgcgcagctcggcagtgacgtcgtagtgcgcaccgctggccttgttctggaaggcccgcgggggaatgccgagctgcgccgccatcgcgtgcagctcggccagggtgtcggccatcaggtgcgcccagcgctgtccgcgccagggatgcaccgcgtcatcgacgtagaccgtcaccgccgcggccggttcaggcctgcggcttgctgtcgctgtcagcggccggggcggcctcggcagcagcttcaaccacatcgccttcggcggcctcagcagcgtgttcgccttcttcggcttccacggtctcgaactcggcaaccagcttgtccaggtattcgtcagcggtctgctcggattcggcagccagggtgtccagcagcttctgcagcagttcggagtactccaggttgaccttgcggccttccttttcctgcacgttggacaggtgcttgagcatggccagcatcggcaccgggttttcggcgttgcccatggtctggccgccgatggccagcagccactcacggccctgcaggccgatggccgctaccacctggccgtcttcgttggtcagcacggcatggttctgcacctgctgctgggcattcaggcggaggaacgggcgcttggcctgctgcttcttgcgcttgtcgcgcttggccttggagttctgggacatggagtggggtcacctggaaacggaaagaccgccattgtaccggccgcacgcaggcggggtcagatccctttccatgggaaagggatctgaccccggttcaatgcgccacgggcgcggcctcaccttgcgcggcctgcacgtccgggtcggcggtcggcgccgacagtcccacctgcgggccggcaccggccagggcggccgcttcggcggcctgggtcatcaccacgatgctgatgcggcggttgatcgggttctgcgggtcggccttgtcgaacagcaccgatgaagacaggccgaccacgcgggtgatcttgctgtcctccaggccaccgtccaccagcgcacgccgtgcggcgttggcacgatcggcgctcagctcccagttgccgtagccgcgcgcggccgaataggcggtgatgtcggtgtggccggtcaggctgatccggttcggcacatggttcaggtagttggccagctcgtgcaggatctgttgcgtgtacggcttcagcgtagcgctgccgaggtcgaacatcggccggttctgcttgtccacgatctggatgcgcaggccttccggggtcaggtccagcagcagctggtccttgaacggctccagtgcctggctcctgctgatcgcttcctgcagttccttcatcagcgcttccagctgctgcttgtcgcgctgctgctggtccaccggctgcggcaccgcttccttctggttctggaagggatcgttgctgctgccgcgcgagatgtcggtggcaccacccagcttgatcatcgaggtgcttgcgccgcccgggccggccatgccgggcgccggcgtggcgttctgcccgctcagcgggctggggttgcggaagtactcggaaatggccgcacggtcgttcttgttggtggtggccatcagccacagcaccaggaagaacgccatcatcgcggtcacgaagtcagcataggccaccttccacgaaccgccatgatgggcggcgtggccggccttcttgacccggcggacgatgacagtgggcttggtctcggccatggtttacttgaccgtcttcaggtgctgctcgaaatcggagaaggccgggcgcacgttcgacggcagcgtcttgcgggcgaattccagcgcgatcttcgggttgtagccgcgcaggcaggccagcagggcggtcttgaccgattcgtagatgcggctgtcctgctcggcgcgtgcctccattgctgccgccatcgggccgacgaagccgtagcccagcaggatgcccaggaaggtaccgaccagcgcgccggccacgtggccaccgacctcgacgatgtcaccgccgatcgagcccatggtgatgacgatgccgagcaccgccgcgacgatgccgaaaccgggcagtccgtcggcgaccttggtcagcacctgcgacggcgccatggcctcggcgtggtgcttctccagttccagctccagcagcggctccagctcatgcggctcgatgttgctgccgatcatcaggcgcaggcagtcggtgatgaagtcgatcaggtggtggtcggcctgcaccttggggtagttggcgaacagggcgctctcggccggccgctcgacatggtcttccagggccatgaagccttcgcggcgggccttgttgagcagttcatagagcaggctgaggacatcgatgtagtcctgctgcttgtagcgcgggcccttgaacacgccgaccatggcctgcagggtctgcttgaccgtcttggccggggtgccgaccaggaacgcgcccagtgcggcaccgccgatgatgaccagctcgtagggctgccagagggcacccaggcggccgtgggcaccgaggtagcccccgatcacgctgatgatgacgaccaggaatccaacgatgatgagcatggggcgacgcaaggagaggggatatctccttgtcggcccgtcacccggttttctgaagagggaattctgtgaaatgggtcagcggggtgtttcagcccgccacaccgctttccgcgccgccacgctgcaacgggtcgggccagggctcgccattgccggtgaacgaaagtgagacggagttcaggcagtggcgctcgtaggtgggcggcggaccatccgggaacacgtggccgaggtggctgccgcagcgcgcgcaggtgatctcggtgcgcaccatgccatggctggtatcgcggatctcgcgcacgtgcgccgggtcgaacggggcgaagaagctgggccagccggtgccggaatcgaacttggtgctggagcggaacagcggcagcgcgcacagccggcagcagtagacgccctcgcgcttgttgtccaggaacacgccgcagaacggcgcttcggtagcgtgctgcagcagcacgcggcgctcttcgctgctgaggccggcgatcagcgcctcggtctgggtggcagtggggggcgtcaggtcgaaggcagtcatgccggctctccgtggggtcgatggcctggggatgccgggaaacgtgggggtgccggcgcgcgcttgcaagtgtgacggccgttcatgggcggcacacaggcgcaggcgcaaggtaaatgcgatccacgccggagcgtgccatgaaaccgacccttcccctgctgctgatggccctgttgcccacgttggcgctggcccaggtgcctgctgccgacccgacggtcacccgcagcgcgaccaccgtggctccggcgccggtggtaccgccgccgcaggccgcacgcccgcagccgcaggtgctgccgtcgccgcagccggcgcagccgatcaggtccacgggtcctgcccggattgcgcccaccccggcgccgaggccggccgacaaggtctatgaccgcaatggccgcatcgtgcctggcgtgcgcccggctggcccgaaccgggtgttcgattcgcgtaccggccgctattacgacagcgtgccggccggcgatgggcagcagatcaaacgctgacctcggatgccaggcaagggtggcagcttccacacactgcacggcctgaacgcacgaaaacaacatcctgccgatcactgctttttcgcctgcgattaaccgtgccgggaccaccgtggccctgcgccggcattccgccgccgcatgtcctttgtccactggatcgcgatcatgaaaaaccagcagaaccgtcatcccggcaaggaaccgcagggccgcaacccgcagcatcagcagcaacagcaacagatggaaccgcagcagccgcacaagggtggcaagcagcaggaacagcgctcgcagaagcatccgcagcagcgctgactgtcgacatgaccggggtcagagtccgctgcgcgggctctgacccctcgcaatccctggccggggtcggatcccgcaacgcgggctctgaccccaacctgcgaccgcctcaatccggaatcggcaggctcagcgtttccttcacttcttccatcacgatgtagcttttggattcacgcacatgcggcagtgtcagcaaggtgctgccgagcagcttgcggtaggaggccatctcactgatccgcgccttcagcaggtaatcgaagtcgcccgagaccagatggcactcgagcacattgggcagcttcagggcggcgcgccggaactcttcgaagatgtcaccggacttgtaggccaggctgatctccacgaataccagcaggctggccttcaccgccgccgggtccaggtgggcgtggtagccggtgatcaccgcttcgcgctcgagccggcgcacgcgctcggtgcacggggtggtcgacaggccgacccgctcacccagttcggtgaaggaaatacggccctccgcctgcaggatgcgcaggatcttgcggtcgatcttgtccagttcgcgggtacgggtggccatggccgtcaaccttggggaatgaattgcaggagaacatcctgccggttgatttcaaaacaggcaaatcaactgggaatggctgtctatacttccccaattatggtcccggcacgctccagtgtagggaatgatcgggttggagaagtcccatgcgagttctagtcctcggcagcggcgtgatcggcaccaccagtgcctggtacctgcgacaggccgggtttgaagtcacggtcatcgaccgccaacccggcccggcgctggaaaccagcttcgccaatgccggccagctgtcgttcggctacacctcgccgtgggccgccccgggcgtgccgaagaaggccatcggctggctgttcgagaagcacgcgccgctggcgatcaagccgggcatggacctggcccagtaccgctggctgtggcagatgctgcgcaactgcacccacgagcgctacgcgatcaacaaggcgcgcatggtgcgcatgtccgagtacagccgcgactgcctgaacgagctgcgcgcgcagatcggcatcgagttcgaaggccgcgacctgggcaccacgcagctgttccgcacccagcagcagctggatgcctccgcgcaggacatcgagatcctggcccagtacggcgtgccgtacgaggtgctggaccgcgccggcatcatccaggccgaaccggccctggcccatgtcgacggcctggtcggcgcgctgcgcctgccgcgtgaccagaccggcgactgccagctgttcacccggcgcctggcgcagatgtgcgtggacgccggcgtcgagttccgcttcgaccaggacatcaccggcctggagttcgagggcgaccgcatcaccggcgtgcgcatcgacggcaagcgggaaaccgccgaccgcttcgtggtcgcgctgggcagctattcgccggcgctggtcgcaccgctgggcatgcacctgccggtgtacccgctgaagggctattcgctgaccctgccgatcaccgacccggcgatggcgccgacctcgaccatcctcgacgagagctacaaggtggcggtgacccgcttcgacgaccgcatccgcgtcggcggcatggccgaagtggccggtttcgacctgtcgctgtcgcagcgtcgtcgcgagaccctggagctggtggtcagcgacctctacccgaagggcggcgacctgtcgcgcgcacagttctggacaggcctgcgcccggccacgccggacggcacgccggtgatcggcgccacgccgttccgcaacctgtacctcaacaccggccacggcaccctgggctggaccatggcctgcggctcgggccgttacctggccgacctgatgagcgcgcgccagccgcagatcagcaccgaaggcctggatattttccgctacggccagtacggtcacgccccgcaacatgagaaccgcacatgcgtcctgcccgcgcgctgatcgatctgggcgccctgcgcagcaattaccggcttgcccgtgaactgggcggtggcaaggccctggcgatcatcaaggccgatgcctatggccatggcgcggtgcgctgtgcacaggcgctggaaggcgaggctgatggtttcggcgtggccaccatcgaagaggcgctggaactgcgccaggccgggatccgtgcgccgatcctgctgctggaaggcatcttcgaacccagtgacatggcgctggtggccgagcacgatttctggttcgcggtgggctcgccgtggcagctggaagcgctggttgcattcgacagcccgcgcccgctgaccgtttggctgaagctggacagcggcatgcatcgcctcggcctggacgtggacagcttccgcgccgcgcatgcacgcctgtcggcgctgccgcaggtcgagcgcatcgtgctgatgacccacctggcgcgtgccgacgagctggacagcgaacgcacccatgaacaggcggcgaccttcgcgcgcgccatcgacggcctggatggcgagaccagcgtgtgcaattcgccggcactgctgggctggccggatgtacgcagcgactgggtgcgcccgggcctgatgctgtacggcgccaatccgctgccggacaacaccgcgctgaccgagcgcctgcgcccggtgatgacgatgcagtcgaaggtgattgccgagcgatggatcgaggccggtgagccggtgggctatggcgcacgcttcgtggccaaggcgcgcacccgcgtgggcgtggtcgcgcttggctacgccgacggttatccgcagttcgcccccaacggcacgccggtactgatcgatggccagcccggcgtactgatcgggcgcgtgtcgatggacatgctgacggtggacctgaccgcgcatgcgcaggccggcatcggcagtgtggtggaactgtggggttctgcgccgacgctgtcggaactggcgccgcgctgcggcgtgagtgcctaccagctgccgtgcgcggtcaagcgcgtggcgaaagtctacgtgtagagccgagtccgcgctcggctctggtagcagccgaccttggtcggcaccgtgcaatgcgtgtcgaccaaggtcgacacctgccggtgggtagagctgcccggaatcatcgtgcagcagtagcccgcgtgctcagctcgcgcttcacccagtcgtcgatcaggcgcttctcgtagcgcagcggatcgctgtcgctcttcagccccaggttgtgcaggtagccggtgtcgctgagcttggcttctccctcatcgacgatgcgaccactggcgtccttcagcgtgtactgcagggtgatccgcggtggatagatgtcgcgcatgatccggatgtcgctgccgcgcgggccgtgccagggctcgtagtcgccggcgcgcttgatgtcgaccagggtcacgtccagggtctgcccgggctgcagcggcttggccgccgtggtctgcacgtagctggccagctgctgcacccagttgccgcgttcggcctcgaagcggttggtgctctggcggatttcggtgaatccggctggatcgtcccacttcacgctgaccgggccattggcctgcagcgcgcgcggcgcatccggatcggtgacggcgcgcggcgcggcgttcgcgctgcccgccatgagggcgcctgccagcagcagggcagtggccaacgagcggttcatgacggtctcctgcgtcccatcgacggggacgatgcgatttatagatcgagtgtgatcccgctttccagccaccgcaacggccgattgcgacaccgacaagagcggttgccgccaattcatcgtcgtcaaccatgactgacggcgcttgacgctgtgaatacgcgctttggaagatgctgtgcttccaatccggcccgtccagacgcccttgtccacactgccgcccctcgtggagcgcccaccgatgatggtgcaggcgcccgaacccgacctgcatcatggcgtgcttgagcgcatcaacgctggtttctgcgtgatccaggtgctgttcgagggcgatcgtgcggtcgactatcgtttcctcgaggtcaacgatgccttcgagcgccacaccgggctgaaggatgcgcgtggacagcgcatgaccgagctggaacccaaccatgagcaggactggttccgcatctacggcgaggtcgcacgcagcggccgtcccgcccagttcgagatggaagcgcgtgcgctgggtcgttcgttcgcggtcgacgcggtgcgcgtgggccggccaggcgaggacaaggtcggcatcctgttcttcgacatcaccgcgcgcaagcagatggaagtggagctgggcgagagcgaagcgcgcttcagcgcattagccgacggcctgccgatgccggtgtgggtgctcgatgagcgcggccatgcccgtttcgtcaacagcgccttcagcgagttcttcggtggcgacgagacgcgtgtgccggaagatgtctggcgcggcctggtgcatccggacgatgcgtcggtattcgaatacgaactgcaggaagcgctgaaggcgcagcgttcgatgcacgcgctggtgcgtgcgcggcgcgccgatggccagtggcgttggctggagatgaacgcacgcccgcgcttctcgcggatgggccgcttcatcggcctggccggcagcagcccggacgtgaccgaacgccgcgagatcgaactggcccgcgaggaactgctgcagtccgagcgcgccgcgcgcagcgctgcggagaacatggcgcggctgaaggacgagttcctggccacgctgtcgcatgaactgcgtacgccgctgaccaccatcctcgggtggagtgagctgctgctgcagcgcgtggacaacaccagccctctgtacaagggcctgaacgtgatcgccaacagcgccggtgcgcagaagcggctgatctcggacatgctggacctcagcagcatgctgctgggcaaggtgcagctggaggtggaagtgctggacctgcgcacggtgctgggcgaggccatcggcgcgcaggaactggtggccgaaggcaaggcactggacgtgcacctgcagctgcccgaacagccgagcctggtgctgggcgatgccacgcgcctgcagcaggtgttctggaacctgctctcgaacgcgatcaagttcaccccggctgaaggccgcatcgacctgcagctgcgggccgacggcaaccactgggagatcaccgtgcgcgacaccggtgatggcatcgcacccgaattcctcaatcacctgttcagccgcttccgccaggccgatggcaccaccacccgacgccatggtggactgggactgggcctggcgatcgtgcagcagctggtcgaactgcatggcggcacggtcgccgcggccagcgaggggcacggccatggcgctacgttcaccgtgcgcctgccgcagcaccttcccgatgccgagcggcgcccgctgcgcgaagtgatcagcgggccgatcctggaaccggtgatcgtcgagccgtatccgctgcgcggcatgcacgtgctggcggtggaagaccagccggaagtgctggagtacctgcggcgcatgctggaagagcagggcgccagcgtgtcggcggccagttcggccggtgaggcgctggcgttgctggccgacaccggccatctgcagtaccacgtgatgctgaccgacatcggcatgccgggcatggatggttatggcctggtgcgcacgctgcgcgaggacatgggcgtggatgccacgaccctgcccgcggtcgccgtcaccgcgctggcgcgtgccgatgaccgccgccgtgcgctggcgtcgggtttccaggaacacgtggccaagccgtactcggtggcgcagctggtggctgcggtacgcaaggtgcaggtaccccgcgcggacagcgcgctgcactgagcattcacggccgatcggcgaccctgcatgcaggaggtcgccgatgtcccgcatagctccccgtatccataccgatccggcgcagatcgcgcgcctggaagccctgctgccgcagctggaaggcgaaacgcaggtggaactgattctgcacgatggccgccgcctgctcggcacggtggccgtgaggccaaccgtgcagcagtaccgcaacgtcactggtgatgaaggcagcaacggccagctgcgcctggatgactacgacacgccggtgcagcagcaccacgtgtggctggacgagatcgccagcatcaaccgcctgccacccaaggcgccttgatcggatgtagagccgagcccacgctcggctgcgccgtcgcccgagcgtgggctcgggcgctaccggtgtgtcaatgctcgaacaaggtcggcgtcgcttcgaaccggcgcgcgtaggcgcgttcttccgccacccgggccacctcgtcatcggccaggtccggtgcgccatataccgcataggccacgctgccatcggcgccatggccgacctggtgcagccggtaacgcgagtgcccgccgccggtgtcctcggggtagtgcacgggcggatggctgccttccaggtccatttcactgttgtcgacgacgccaccgacgaacaaggctcgcatgcaggttctcctgggtttccgggtgagcctctaccctgaacgtttcaatgtttctggcagatcaaggccccgttcgggtttcgcaaagcggcctgccggggccggcccggccaagccggtacaatggacggccctcacgcttgaagtacccgcgccgatggcctccagcgacgacgcccccctgcagaccctgctcctgccgttctcccaaggcgccctgcgctggccggagggcccggtggctttcctgcgtgcccgcgatggctggccgctgcgcgaagcggccggcaaccgcgagctgcactgcgaacagagctttgccccgttcgcgcagccgctgcagcaggccgccggctggaccgtcagcggccagctggacgatgtggccggcaagggccgttacccgctggtgctggtgctgccgccgcgccagcgtgaagaagcccgtgcgctgttcgcccgcgcgctggcgctggtcgccgagggcggccgtatcgtcgcctgccagtccaacaacgaaggcgcgcgctccggtgaaggcgacctcaagcagctggccggtctcggcggctgcctgaccaagaaccactgccgcgtgtactggaccgccccgctgcagggccagcacgaccccgacctggccaagcgctggtcggcgctggatgcggtgcgcccgatcatgggcggacgcttcctcagccgcccgggcgtgttcgcctgggaccgcatcgatccggcatcggcgctgctggccgagcacctgccggccgacctggccggccgcgccgccgaccttggcgccggctacggctatctctcgcgcgagctgctggaacgctgcccgaagatcaccgcgctggacctgtacgaggccgagcagcgtgcgctggccctggccgaactgaacctggcgccgccgccgcgcgcgctgccgctgcgcttcctgtggcgcgacgtcaccgccggcatcgagccgggctacgacgtcatcatcagcaacccgccgttccacacgccgtcgcgtgccgaccgcccggacatcggccagcgcttcatcgccgtggccgcgcaggcgctgcgcccgggcgggcgcctgtacgtggtggccaaccgccatctgccgtacgagcacaccctcaacgacagcttcggtgcggtgcgcgtggtcgccgagcgcgacggtttcaagctggttgaagcagtgaaggggaagggcaagtgaagctggtcaagctcatcgccaacctgggctatggcagccgcaagcaggtgcagtggatgttccgcgaaggccgcgtcaccgacgccgacggtgaggtgctgtacgccgatgaccaggtgccgcacgaggcgatccgcgtcgatggcgagccgctggacccgccggtggggctgtcgatcgcgctgcacaagcccgccggctacacctgttcgaccaaggacaccggccgcctgatctacgacctgctgccgccgcgcttccgcgaccgtgatccggtgctgtccacggtgggccgcctcgaccgcgagaccagtggcctgctgctgctgaccgacgatggcggcctgctgcaccggatcatctcgccgaagtcgaagctgccgaaggtctacgaagtcgagttgagcgaggacctgcgcggcgacgaagtggcgttgttcgccagcggcacgctgatgctggagtccgagaagacgcccctgctgccggctgaactcgaagtgctggaggcgcgtcgcgcacgcctggtgctgcatgaaggccgctaccatcaggtacgccgcatgttcgccgccaccggcaaccacgtgcaggccctgcaccgcagccgcgtcggcgggctggacctgcaggggctggacgaagggcaatggcggcagctcacttccaccgacctggatacgttgttcgctccatgacccccttcgctgcgctgccgttcctgcccgacgccgtcatcttcgacatggacggcctgatgatcgacagcgagcgggtctcgctggcctgctggagcgaggccgccgacgaattcgggctgggcctggaggaagcggtgttcctgcgcatggtcggcctcggcgaccacgatacgcatgcgctgctgcgcgcgcagggcatcgaggacagcgtgatcgacgcggtggcggcacgttgccatgagctgtacgaagcacgcacgcagaccgggctgccgctgcggccgggcatcctggagctgctggagctgctgaaggcgcacgcggtaccgcgtgcggtggcgaccaccacgcggcagccgcgcgccaaccgcaagttggcggccgcaggcctgctgccgtacttcgatgccgtgatcaccagtggtgatgtggcgcggccgaagccggcgccggatatctacctgctggccgcgcagcggctgggccaggcgcccgaacgttgcctggcgctggaagattcaccggccggcacgcgggccgcactggccgccggcatgaccgtgatccaggtgccggacctggtgcatccggatgaagagctgcgcgcactgggccaccgcatcgtcggctcgctggtggacgcgcacgccctgctgctgccgctgctgccgaagtagcggtggctgccgaccttggttggcactgagccgggcatgggctcggctccacatcttctggtgggtgccgaccgttggtcggcacacctgttcaatcacacccgcccgaacaccagcgcagcgttggtgccaccgaagccgaagctgttggacatcaccgtgtccagcttctgctcgcggctttcgcgcaggatcgggaagctctccaccttcgggtccagctcgccgatgttggccgaaccggcgacgaagccatcgcgcatcatcagcaggcagtagatcgcctcgtgcacgctggccgcgcccagtgaatggccggacagcgccttggtcgaggacagcggtggtaccgcatcgccgaacacttcacggatcgcgttgagctcggtgacatcgcccagcggggtcgaggtgccgtgggtgttgaggtagtccagcgggcgatcgacgccctgcagtgccatcttcatgcagcgcaccgcgccctcgccggacggcgcgaccatgtcggcgccatcggaggtcacgccgtagccgatcagctcggcatggatgtgcgcgccacgcgcaacggcgtggtcgtagtcctccagcaccagcatgccgccgccaccggcgatgacgaagccgtcgcggtccttgtcgtacggacgcgaggcgctggccggggtttcgttgaagctggtcgacagcgcgcccatcgcatcgaacatcacgctcatcgaccagtgcaggtcttcaccgccaccggcgaacatgatgtcctgcgcaccgtggcggatcatgtccgcggcagcgccgatgcagtgcgccgaggtcgcgcaggcggccgacagcgagtagctgacgcccttgatctggtaggccgtggccaggcaggccgagaccgtcgagcacattgtgcgcggcaccatgtacgggccgaccttgcgcacgccacgttcgcgcagcaggtcgaccgcgccgatctgccattcgctggatccgccgccggaaccggcgatcaggccggtgcgcaggttgctgacctgctcggggctgagcccggcatcggcgatggcatcgcgcatggacaggtaagcgaaggccgccgcgtcgctcatgaagcgcttctgcttgcggtcgatcagcgcctccagatcgaggtcgacgcgaccgccgacctggctgcgcaggcctgcttcggcatggtcggccaaggcggtgatgcccgagcgcccttcgcgcagcgcggccgaaacggtatccagatcattgccgaggcaggacgtgatgcccatgccggtgatgacgacgcgacgcatcagaagctcccggtttcagtgaacaggccgacgcgcaggtcgcgcgcgctgtagatttcgcggtcatccacgtacatgcgggcgtccgactgggccatcaccagcttgcggttgatgacacggctgatgtcgatctcgtagcgcacgagcttggcgtccggcagtacctggccggtgaacttcacctcgccgcagccgagtgcgcggcccttgccgggggcacccagccaggtcaggaagaagccggtcagctgccacatggcgtccaggcccaggcagccgggcatgaccgggtcgccgatgaagtggcagccgaagaaccacaggtccgggcggatatccagctcggcgcgtaccatgcccttgccgtgcggtccgccgtcctcgtggatgtcggtgatgcggtcgaacatcagcatcggatcgttgggcaaacggccggcggcggtgccgaacagttcaccgcgtgcgctggccagcagctgttcgcggttgaacgcgtggagacgggtcatgaagcacaatcctggaagcggggaaacagggaaacaagcgttcgaggatgcccgtggaaactgcgccgatcaaacatttcaaccgtacgcaaccgtagtgttttcaatggaatacgcgcatcctgttgatgtgcaacgaccatacttcggcgtgtggcccgttcgacacgcccccgccctttccgcctgacatgacccgactgcgcaagatcatccacgtcgacatggacgcgttctacgcgtcggtggagcagcgcgacgatccgtcactgcgcggcaagccggtggttgtggcatggcgcggcgcgcgctcggtggtgtgtgcggcgtcctacgaggcacgcgtgttcggcgtgcgttcggcgatgccggcgctgcgcgccgaacgcctgtgtccggacgcgatcttcgtgccgccggactttgcacgttacaaggcggtgtcacgccaggtacgcgagatattcctgcgccacaccgacctggtcgagccgttgtcgctggacgaggcctacctggacgtgaccgagccgaagagcggcatcgaactggccaccgacatcgcccgcaccatccgtgcgcagatccgcgaggagacgaacctgaccgcttcagccgggatcgcgccgaacaagttcctggccaagatcgcttcggactggcgcaagcccgatggccagttcgtgattccaccgcagcgggtggacgcgttcctgctgccgctgccggtgaaccgggtgcccggcgtcggcaaggtgatggaaggcaaacttgccgcgcgtggcatcgtcacctgcggcgacctgcggcggtggtccctggtcgacctggaagaggcgttcggcagtttcggccgcagcctgtacaaccgtgcacgcggcatcgacgagcggccggtggaaccggaccagcaggtgcagtcgatctcctcggaggacacctttgccgaggacctgttgctggaagacctgggcgaggcgatcgtgcagctggcggagaagacctggaatgccacgcgcaagaccgaacgcgtcggccacaccgtggtgctgaagctgaagaccgcgcagttccgcatcctcacccgcagcttcaccccggagcgcccgccggaatcgatggaagaactgcgcgacatcgcactggccctgcgcgcccgcgtcgacctgccggcggagacgcgctatcggctggtcggggtcgggctgggtgggttccgcgaaaaggaggccgtggtgcagggggaattgttcgagcacggaccgagcgattccacatccctctgatcggcaaaggcggggccagagcccgttgcgcagcaacgggatccgaccccagcagattgccgagatctgtcgaaggcgaggtgggtccggttgcgggggcgtgagcggcatggatgccgcgaccaagcccccatggacgggttcacggcgtcccctgccatcggacccaccccgccaacccacagatatccagctgttgccgttgcattgagcaggtgcagggcgcagccctgcaaaacaaccctttaccttaaggccactgcatctcgcccttggccaccttcgcactcagctccagcgatgccacgccgtccagcttcgggtagcgcgactgcattgctttcaccagcgccgcactgtccttggcctttgccgtctcgacatcgaacgcgcggatgtagtccgcagtgaagcgcagcgcactggcatccagtgcggcacccggcgcgtaatgccccggcaccaccaccttcggcttcagtgcctgcaaccgctgcagggtctgcagccagtcggtatgcgacttaggcgtctgcgtgtcggccatccacacgtgctcgccggctaccaccggaatgccaccgacgatcgcgcgcagcgacggcacccacagcaccgtgcggtccggggtcgggccatccaggccgatcagcggcaggcgctggccttccagctgcagtgcatcgccatccagcacctgcggcagcacgatgcgcgcgggcacgtcggcacccatcttcggtccccagtaggccagcttgccggccagggtctgctggatgtgggcgacggtctgcgcggtggcgacgatgcgtgcctgcgggaaggcgtcctgcagggtggccaggccgaagtagtagtccggatcgccgtggctgatgtagatcgtggtcagctgcttgccgctggcgcggatcagctcgaccagcttgcgcgcatcgctggcaccaaactgcgcattgaccaggatcccgtcgtggcggccttcgatcagcaccgaggacaccgagaacattgcctgcgggccgggatggaaggtctgcaggtgcagctgggatttcgtcgccgccgccggcgccgtggtggccggtgcggccagcagcggcgcactggtgaagctggcggccagggcgaggggaagcagcagggcagcggtacgcatgggaattccttgtgtagagccgggccaatgcccggctgcatgttcgcgtagagccgagcgcgggcttggctctacatgggacgtgcgtggatcaatacgctgcggtgatgatctccttcggatacgcgtgcgcttccagttcggcgacgaacgccgcgccatagtcggcgtagctgatgcggctgtggccgctggtatcggccaggaacgccttgggctgcacgcggtactggccgcgctcttcacccgggccgatttcggcggccggcgagaagaaggtccagtccaggtcgtccactgcctgcaggcggttgaacgcctcgcggtgggccagcgcgtacggcttgtaggcctccgggaaggtgggggtgtcgaccagctgcacgccgggtgcgacttccaggctgccggcaccgccaaccaccaccaggcgcggcacgccggccttgcgcgcggcagccgccagctgcgcggcgacctcgccgacgcggccgatgtcatcgcccgggcgcgggccgtaggcactggcgagcacgtcgtggccggcgatggcggcaaccagcgcgtcctggtcatccagcgaggcgatcaccggatgggcaccggccagctcggccgggaggtcctgcgcgctgcgcacgatgacggtgagttcgtggccgcgggccagcgcgtggcgggcgatctggcggccgatgttgccggtggaaccaacgagggcgatcttcatggcaggactccgtggggcgctgtggggtgggaatggcgccactctaggccgctgcagtcgctcgaaaaacagcgtataacgtgcttgtttgttgcatggatcgagcatatggaccgattgaccgccatgaccgtgttcgtcgaggtggccgagcgcggcagcctgaccgcggcggcagaggtgctggacatgtcgcgggcgatggtcagccgctacctggctgaggtcgagggctggctgggcgcacgcctgctgcaccggaccacgcgccgggtcagtctgaccgggcccggcgaggcggcgctggcgcgcttccggcagatgctggcgatcggcgaggaactgcagggcgagctggccagcgatgatcccgagccgcatggcacgctgcgggtgactgccagcgtgtcgttcgggcagagccacctggcgcgggcggtggccggctttgttgcgcgccatccggcggcacgcatcgagctgctgctggtcgaccgcacggtgaacctggtggaggagcgggtggacctggccgtgcgcatcgcgcgccagatcgatcccagcctgatcgcgcggcggctggccacctgccgctcggtgctgtgcgcgacgccgtcctacctgcaggcacgcggcacgccgactgctcccgagcatctggccgcgcacaactgcctgacccaccactacgtcggcaagagcctgtggcagctgcaccgggacggccgttcgctgtcggtggcggtgggcggcaacatcagcgccaacgaggcctcgctgctgctggaggcggtgcgggccggtgccggtatcgccatgctgccgacctaccaggtggcgccgctgctgcgtaccggcgagctgatcgaactgctgcccgaattcagcctggacgaactcggcattcatgccgtgtacgcgtcacggcgacagcagcccgctatcatgcggcgattcctggactacctggccgagtgtttcgccagcccggccttccaggatctggattggcgcccaccgggcaaggagaacacatgaaccatggacaggccttgatcgaccacaaccgtgctgcctgggaccgccaggccagcgaagtgcgcgaatggtcgcgcccggtggaaagttcaaccattgccgccgcgcgcgaaggccgctggcaggtgcatctgaccccacgcgcgctgccattggactggctgggcgatgtgcgtggccgccgcatcctgtgcctggcctcgggcgggggccagcaggcaccggtgctggccgctgcgggcgccgacgtcaccgtgttcgatctctccgacgggcagctggaacaggaccgcagcgtggcggcgcgcgatggcctgcagctgcgcacggtgcagggcgacatgcgcgacctgcacgtattcgccaacgacagcttcgacgtggtgttccatccgatctccaacctgtacgtacccgacgtgcgcccggtgtggaccgaatgccgccgcgtgctggcgcgcgacggcatgttgatggccagcttctacaacccggtgctgttcgtcggcgcgcgcgatccgcagctcgatgcgcagggcctgatccggccgcagtacgccattccctattcggacctggaagacctgcccgccgcagaacgtgaggcgaaactcggccgcggcgatgcgctgacctttggccacagcctgaccgaactgatcggcgggcagctggatgcggggttcgtcatcgatcgcttcatggaagactggcagccgcagccgcgcttcctgatcgaccgctacctgcccacgttcctggccacccgcgcacgccggatcggttgaggcggatcggcgcagaaaccagcggcgtacaatgggcggccccacgtcgtgcaggtgccgtcccttgtcgtatccctatccgctggtcgtgttcgacctagatggcacgctggtcgacagcgcagctgatatcgccgaagcactgaaccgcacgctggaagacatcggcatggcacgcgtgccggaagccacggttctgggctggatcggcgacggtgtgcgccgcctggtcgagcaggccgtgcacgccgcgggtcgtgaggtcgacctggccgaagtgatgccggtgttcatggtgcactaccgtgagtgcctgctgcgcagcccgcgcctgttcgatggcgtggccgaagcgctgatgcagctgcgtgcacgcggtgttccgctggcgatctgcaccaacaagcccgaagcgctggtgccgccactgctgcaacacctgggcattggtgatgcgttcgcgctggtactgagcggcgattcgctgccgcagcgcaagcccagcggtgagccgctgcggcacatcgctgcgcacttcgggctggcggtggatgcctgcctgatggtgggtgattcgttgaccgactaccgcgccgccgaagaggcaggcatgccgatcgcactggtgcgttacggttatccgcgtggcctggacctggccaccgcacaggcggtggcggtgattgacgacctgcgtgagttgccggggttggccgcgggcgttcgggtgtagagcggagcccacgctcggctgcttcattgcgtgagccgagcatgggctcggctctacagtagatcggcgccgggcgatgcccggcgcgcgccttcatttcggctggtaacgcacgctcagctggtattcgcggccgggctggttgaaccacgccaccgtctcgtagcggcggtcgaacacgttggcggcacgtgccagcagcgaccacgccggcgtcagcgcgtactcggcgcgcaggtccagcgtgccgtagccgccgaccttcaccgcgttggcggcatcgtcatagcgcttgcccgcaccctgcacggtcaggccggcgcggaaatcgccgaagcggcggtcgacgtccagacgcgcggtctgctgtgcacggcgcggcagccagttgtcgaactgggtgctgccatgggtgcggttgcgcgggtcggtgtagctcagctgcgcgttgaggtcgaagccggccagcagcacgccaccggtcagttcggcgccacggatgcgcgccttctccacctgctgcattttcatcgtggacgcatcgtaggtgatcaggtcatcgatgcgggtctcgtacacgtccaggccccaatgccagccctggccctgctgcgaaacaccgaggttggcgctcttggacttctccggcttcaacgttggcacgccgctccacgggtcgtacaggtcgctgaaggtcggtgccttgaaggcggtgccgtagctggcattgacgcgcaggccgtggtccagctgcattgcccagccgagactgccggtggcgtggttgccgaactgctggttgtcgtcgttgcgtgcgctggcctgcagctgatggcggccgaagcggccctggtactgcacgaacacgccggtgttgcgacggctgtcgacgaggtagcccgcgctgctgccgtccaggttgtcttcgctccagtccacgccggtgctcagcagctggcttccggtcaaggtgaagtcaccctgcagcgaggcgctgtcgcggtgggtctgcgcgctgccgcgtgcgccgaagtcgccgaagttgtccgattcgttgtcgctgcggccgacgttggcggtgaacgccaggcgcccggacggggtgtagcgcaccttgccggccagcacctgctggcgggtttccgagtagttgtaatagccgtcgtagtggttcttgccgtcggcgcgcagcgcactgccttccacattccactggtcgttgaaggtgtagccgccacgcaggctcttggacaggttgcggtagccgtcgcggtcgggttcgtcagcgaagcagccggtgaacagcgtcgccgagccacggcaggcatcgacgccatcggaatgctggtaggcgatgtcggcgccgaaccagccgcgttcggtgccacctccgatgccgccgctggcttcgcgcaggccgttgctgccaccaccgagctggaagtgcggagcaaaatcgcccaggttgcggcgggtgaagatctggatcacgccaccgatggcgtcggcgccgtacaggctggactgcgggccgcgcacgatttccacgcgttcgatctgcgccagcggcaggtcctggtacatggccaggccgaggtcggcactgttgatgcgcacgccatcgaccagcaccacggtgtggcccgagttggtgccgcgcaggaacagcgagctctgcttgccgagcccgccggcattggtcaggttgatgccggcgcggccgcgcagcagttcctgcaacgaggtggcctggctggattcgatctgcgcgcggtcgatcacctgggctggtgcgatgctgtcctgcagggcgatcggggtgcgggtggcggtgaccaggatctggtcgagcgcggtggtgtcatcggcggcctgggccagcgcgggcagggcggccagcacggccagggacagcattcgggactgcagcttcatgggggactccaggtgccacgcacgcccgcgtggcgaagggaaggagccgcgaaggcaggcatgcgccgacgccgcagcgcgggctgcggtcatccagcgccatgcccaccgcaccgcgacctgaggcttccgggccggtctccgggcttgccgccgggtggcgcgaggccaccgtccaggcgccttcccatgcctgcggcacagtggcgttgttgcctggaactgacgtgcttaccgttgcgggggcagcgccggcctggcgtggattcacgcgtcaccggcttcccgtttcaacctgccggccgtggccgcaggtcacctggaagtgcgcgcagtctacggcatcgcaggcggcccgtagcgtcgagcgtacccgactgcctttgctgtgcccttagaatggtccctcgatcccgtggtgccgttgccgatgtccgcccgttttccgctgttcccgcgttgcctgtacaggacgcacgcatgatcctcgacctggtccgccatgccggcaacggtcgcgatgagttcctcgatggccgcagcgatccaccgcagctggcccgcctgccgcaggaactggtcgaggcctacgctgcgcagccctgggaacgggtgatcagttcgccgcggctgcgctcgctgcacacggcgatggccctggccaccccgcgcgggctggacgtggaagcggaggaggaatgggaagagctggatttcggcgattgggacgggcagtcgctgttcgacctgccggaggatgcactggcggccttccatgccgatccgcatgcatacccaccgcccaacggtgagagctggggccacttcgagcggcgtatcgcgcgcgcgctggatcgactgctcgatgatgacgacccggtgccaacgctggtggtcagccatggcggcccgctgcgcatggtgctgtcgcaggtctgcggcctgccgatgtcgctgtgctgggcactgcgcatcgaccacggcacgcgcctgcgggtacggctggaacgtggcgaagccgggctggcaggcgagctgctggaactgcagcagccgtaacccatcggtagtgccggccgctggccggcagtctcaggaatgttgaaaagaccacgcagttgccggccagcggccggcactaccggtgcggtcaatcctcgtccgcatcctcggtcacgctgtcttccgcgtcatcgtcggcatcgaagcgctgctcatgcaccggacccgacgccgggccggccgccttcagcggatgcgcggcgatgcgtgcttcgtaatcctgcaccagcgcctcacgctgcggctcgctcagttcctgccagtggcagtccagcagcgcgccttccagcgagtacagcaggttcaggctgggcttgaagccggcgcgcttgaccttgacgaaggcgccgactgcgccggtcgcaaccaggtcctcgcggctgcgcaggccgacctggcgcagccacgctgcactcttggggccgatgttgcgcagcttcggtgcgctcatcccagcgcctcgacgaacacgcgggcgatggcttccaggccggcctggtcatcggcatcgaagcggccgatcttcgggctgtcgatgtcgaacacgccgatcagttcatcgccgcgcagcagcggcaccaccagttccgaacgcgaggccgaatcgcaggcgatatggccggggaaggcatcgacgtcgtccacgcgctgggtcacgcgctggctggcggcggcaccgcacacgcccttgtccagcgggatgcgcacgcaggccggcaggccctggaacgggccgaccaccagctccgtgccgtcgtacaggtagaaacccacccagttcaggtcgggcagggcgtggtagaccagtgcggagaggttggccgcgttggcgatgcggtcggactcggcgtagaccaggccacgggcctgttccagcagctgggcgtattgttccggcttgctgccggtaagcgaggcattggcgaacatgcccgcagtctagcaagcgcgccgggccggcgataatgcacgctctgttgccctgttggagcccatcgatgccgttgcccgctacgctgccgcctgccctgttcattaccggcaccgatacggagatcggcaagaccgcggccagcaccgcgctgctgcaggcgctgcgccggcgcggcctgcgcgcggtgggcatgaaaccggtggccagcggcagcgaagacctggggcagggcctgcgcaacgaagacgcgctggcgctgcaggcggccagctggccggtgccggactatgccgatctgaacccgtatgcgctgcggcagccgctggcaccggagctggccgctgccgaggacggcgtgcgggtggaactggcgccgatcgtggctgcgttcgcgcgactgcgcgcacaggccgacatcgtggtggtggaaggcgtcggtgggtggctggcgccggtctcggccacgctggaccagctggacctggtgcgagcactgcagttgccggtgctgctggtggtgggcatgcggctgggctgcgtcaaccatgcgcggctgactgcgcagtcgctgcaggccagcggcgtgcagtgcctgggctggatcggcaaccacatcgacccggcgatgcagcgccaggatgagaacatcgccacgttgcagcagcgcctgccgatgccgtgctggggacggctgccgcatctgccgggtgcggatggcgaagcgctgagcgcgcacctgctcgagcgatcctgggtagtgccgaccgctggccggcaaccgcatccacccggtgatcccgatgttgccggccagcggccggcactaccgtgctgcggccgccagctcccgcgcgatcgcgcccagtcgttccaccgcgccaatgaagcgcgcatccagggtctggcagcacgacagccgcaggcagtggcggtatcgcgcgccacgtgaatagacctggccgggcatgaacacgatgtcctcctgcagcgctcgctcgaacagctcgcgcgtatccacgcccggcagttccagccacagcaggaatccgccctgcggttcggtggcgcgggtgccggccgggaagtgctcggccaccagctggcgcagccgtcccacctgttcgcggtacagccggcgcatgcgatgcaggtggtgctcgtagctgcccgcttccagatacgccgcgaccgcgtcaccgagcagctgcggctcgccgccggtggactggaatttcagcagcgcgatgcgctcggcgaagcggccgccatccagccagccgatgcggtaatccggcgccagtgtcttggagaaacctccgaccaccatcacccagccgtcgcgatcgaaggccttcagcaggggcgccggcggttcgcagaactgcagctcggcgtacaccgcgtcctcgatcagcggcagctgccgtgcgttgaccagctcggccaggcgctgcttggcggcggtcggcatggtgcagccgagcgggttgtgcacggtcggcatcaccaccagcgcggccagcggtgtgtgctgcagcagcgcgtccagcgcatccacatccagtccgtgctgcggatgggtgggcagctcgatggcctgcaggccgaggttggccagcaacggatacaggttgaagtaggacggtgcctcgatgccgaccgcatcaccgggctgggtgaccgcgcgcagcgccagctgcaggccctccatcgcaccatgggtcagcagcaggcgttcgctgtgggtgtgcagccccatgcgcgggccacgccgcacgatctgcgccagcagccgtggcgagccgttggggcgcgcgtaggtctccaccgtctgctggccgtggcgcagcacctgtgcggtatgccgggccagctgcgcgcccggatagaactggcgcccgcgcggaccggcaaaggccaggtcgatcacaccggggcggcgctgtgcttccagcacgcgggccatcagcacctgctgcagtggtgcggtgggtgcggacggggtatcacgcagcgaacgctctggcaccgacaagcgcggcgccacctcgaagccggctttgggccgcggaatgaccaggccggcgtcctccagctggcgataggcggcaatcaccgtgttcaggctgagcctgcgctgcagggccatctgccgcagcgaaggcaggcggctgccaaccggaaggcgtccgccgtggatggcctcggccagctcatcggacagccgttggtagcggggtgggatcatcgcgctctggtcatctgtatccatcgaatttcccaccatctggtgctgtacccatgatgatggcgagcctagcatgtcgttgtcggccgggcctgatcggggcacggccgatacttcccaaacgcacggctggatggccgtgcgtctttttctgtgtgtagagccgagcccatgctcggctgcacttccgccaacagcagccgagcgtgggctcggctctacagagagcaccgccgagcgtcggtcagcccaagggggaatgccggctaccgcatcggcaccagcaccgcctcgcgccggtacagcgccgggaactgcttgcccagcgcggccagcttcggtgcgtcgtagtagcggatgtaggccgcctgcgggtagttggtcatgtagttctggtggtagctctcggccgggtagaagcgctggccgctgaccagctgggtgacgatcggcgcgcggtagctgccggcctggccgagctgggcgatgtaggcgcggctggcagcctgctggcgtgcgtcgtcactgaagatcgccgagcgatactggctgccgtggtccggcccctgccgattgagctgggtcgggtcgtgcaccaccgagaagaacacctgcatcagctgcccgtagctgacctggcgcgggtcgtagtcgatcttcactgcttcggcatgcccggtctggccaccgctgacgcgctcataacgcgcattggccgcactgccaccgatgtagccggacacggcattgctcacgcccttgacgtgctggaacacgccctgcacgccccagaagcaaccaccggcgaacaccacgctggcgtggggggcgtcatcgcggaacgccgcatcgccggtgggggccggcagtgcctggatctgcgcgctggcttcgatcggcgccgcaatcgcgccgtggtcaaccagcagcacaccggcaatcaaggccgtggccaccaggccggccacaccggcggcgatgccctgttcaaaggagagtttcatcatgtcctcccggttcaaccgaaggtgaaggcataggcctgcacgcccgcatcgaggaactcgatctcgaagcgatgcgggccaactgcgccgcgctggcggatcagctggtacaggcggtgctcgtcgacgacgccactgccatcggcaccaacatcactgccggcatcggcggcgggcagcgctttgccgtccagccagacgcggaagcgcaccggcctgccgtcctcgctcggtgccagcaccaggtgcaggtcgcgcgcatggaactggaaggcgatgcggccgccggcctgctgcagctgtgcggcctcatcggtgacggtccagcgcccggacagcccccactggttcaacgccaaggtggccggcagcgtgtagtcgaacgcggcgtcgctgcgctgcccgccgggcgaggcgaactgctcggcgcgggcgtgtcccaagtaggtttccggcgaacgcaggttgcccatgtcggcctgcacggccacgcccttcaggccggcggcagcgggatcggccggtggcggcagattggtctgcccggcttcggtcagcaggcgacggatcatctgttccgagcgcgcatagttgccctcgccgaactggtggccgcggatgttgccctgcgcgtcgacgaagtactgcgccggccagtagcggttgttgaaggcgcgccagatcgtgtactggttgtcgagcgccaccgggtactcgaccttcagctgctgcaccgctttcatcacgttgcgtgggtcacgctcgaaggcgaactccggcgtgtgcacgccgaccaccaccaggccgtggtcgcggtagcgtcgctcccattcgtgcacgaacggcatcgcgcgcaggcagttgatgcaggaataggtccagaaatcgaccagaaccaccttgccgcgcagctgctgtgcactcaggggcgggctgttgagccagccagtggcaccgtccagcgcgggcagcgtgccttccaccggcagcgctgcatcggcaccggcattggcgccggccatcatcatcatcggcggtgccgccggctgcgcgccgggcactgcatccagcaggcgttgctcgatacgcgcggtgctgaccgtggacaagcgggtcagcaggccggtatcccagccgaggccgatcgccacgacggccagcagcgcggccacacccagcaccttgcgaagtacatcgccgaggccgagccgcgcctgcatcgcgcggaacacccggccgccgatccacaccgccagcgccaatgcggtgatcgcacccagtgcgtaggccagcagcagcgcagtggtaccgacgctggcgccatgcagggcggcgccggtcagcaccaggccgaggatcggcccggcacacggtgcccacagcaggccagtggcgatgccgatcagcagcgaggtccacgcgccgccgtgccccgcggcatccgccgcatcggcgcgcgcactcaggcgggcacccacgcgctggaacggcgccagcaggtggtcggccagtcgtggccagagcagggcgaccgcgaacaacgccatcagcagcagggcgacccaacgtccgacctggttggcctgcgccacccattggctgcccaccgcggccaggctggcgaccacggtgaaggtgagcgccatgcccagcagcagcggcagcgtgctgcgcaggaacgggcgatcggcacgcgcgaacacgaacggcagcaccggcaggatgcaggggctgagcagggtcagcgcgccccccagataggcaagcagcaacagcagcatcgtcaggctccggaagcaggggaagaaccgaccggcacccgccagccgtcggcagtgccatccgtggcgccgggaacgaacaccatcgccgcaccgttcatgcagtagcgcagcccggtcgggcgtggcccatcgttgaacacatggccgagatggccgccgcagcggcggcaatgcacctccacccgcagcatcccgaaggtgacgtcgcggtcttcgccgatggcgttgtgcaggggggcccagaagctgggccagccggtgccactctcgaacttggtggacgaggagaacagcggcagcgcacagccggcgcaggcgaaggtgccctgccggtgttccttgttgagcgggctgctgtagggccgttcggtggcctgctggcgcagcaccgcgtactgcgctggggtcaggcgctggcgccagtcggcatcgctgtgcatgacctcgaactgtcgcgacgggcggcgcttcggcggcggccggggcgggcgcggctgcaggcccccacggccgaacaggccggcggcggtggcgacaccgcccaggcccagcagatggcggcgggagagggacatggcggactccgggaaggggcgacggggccatgctgcgcccgcccgggtcaacgaatcctcacgcaggattcaatttttcgtgaggtatcggcggccgtcccgcgccacaatgcagccagcctccccactggccccgagctgccgatgtcgaccaaacgcgtgctgatcgttgaagacgatgcccacatcgccgacctgctgcgcatgcacctgggtgatgagggctacgacgtcgcccatgccgccagcggcgatgccggcctgcgcctgctcgagcaggacggcccgtgggatgcgctggtgctggacgtgatgctgcccggcgtggacgggctgcaggtgtgccagcgcgcgcgcgcgatggcgcggtatgtcccgatcatcatcatcagcgcgcgcggcagtgaaacgcagcgcatcgtcggcctggaactgggcgcggacgattacctggcaaaacccttttcgatgccggaactggtggcacgggtacgcgcgctgctgcgccgcgccgaggcgatggcgcagagcgcgcgcatcgatgccggcgcgatcgagctgggtgggctgcagctcgatccggtcgcgcgcaccgcttcggtggatggcaacacgctggaactgacgccgcgcgagttcgacctgctgctgttcttcgcccgtcatccggaccaggtgttcgcgcgcatggaactgctcaaccaggtctggggctaccagcatgatggctacgagcacacggtcaacacccacatcaaccgcctgcgcagcaagatcgaacccgacccggccaacccacggcggttgctgacggtgtggggccgcggttacaagctggtcgacccggccggggcggcggcatgatcaagccgaacctgtggcagaagctggcggtggtgaccgccgcgctgatgctgatgtgctgcatggcgctgctggcactgcagatgcgtgccaacacccgccacgagcaggaagtcgtgcagcggctgtcgctgggcctggccgaacatatcgcccagcgcagcgagctgatggacaccagcggcatgcgcgatgccgcggtgcgcgcgctgttcggccagctgatggcggtcaaccccagcgtcgaggtctacctgctggacgaccagggccgcatcctcggtcacgatgcacccagtggacatctggtgcgcaaccgggtggatgtggcgccgttgcgtcgcctgctggccggtgcaccgttgccgatcctcggcgatgacccgcgcagcgccgatggccgcaaggtgttcagtgccgcaccattgatcgtgcagggccggccggccggctatgtgtacgtggtgctggtcggcgagcaccggcagatgctcgccgacgatcttgccgccggcagccagtggaacaccacgctgtggtcggtggtgctggtcggcagcctcggcctgttggccgggctggtcgcgttctactgggtgacgcgtccgttgcggcggctgacccggcggatccaggcctttgacatcgatgcgccgccgccgctgccgccgccggagccgctgcgcgctggtgagcgcgacgaactggtgatcctggaacatgcgcacgcgcagatggcgcagcggctgggcgagcagtggcagcagctgcgccagcaggatctgcagcgccgtgaactggtcgccaacatctcgcacgacctgcgcacgccgttgtcgtcgctgcacggctacctggaaacgctggcgttgaaggacgccacgctgtcaccggacgagcgccgccgctatctcggcattgcgctggcacagagcgccaaggtcggccggctggcgcgcgcgctgttcgaactggcgcggctggagcacggcgaagtgcggctggagtgggaagtgttcgcgctgccggagctgctgcaggacgtgctgcagaagttcgaactggcggcacaggcgcgtggccagcagctgcacgcggcgtttccgcccggcctgccgctggtccgtgcggacctgggcctggtcgagcgggtgctgaccaacctgctcgacaacgcgctgcgccatgcacccgagggtggccagatcgaggtgcgcctgcgcgcgaccgccgacagcgtggaggtctgcgtcgccgatgatggccccggggtagccccggcgctgcgtacccagctgttccaggcaccggccgcgctcggcgcgcggcgtggcgacaacggcggattgggcctgttgatcgtgcagcgcatcgtgcagttgcatggccgccgcatcgaactgcgcgacagcgaacggggcgcgctgttcgtgtttgccttgccgcgcgcggaaacggcggtctagcaggctgcctcggcctccacgacaccgccggtttccagcggcaggtgcaggcggatgcaggcgccgcccagcgccgaatcggtcacctcgacctggccgccatgcttgtcggccaccacctgcaccagcgccagcccgaggccgaagccggggctgcccgggtccagccgcacatagggttgcagcacctggccgcgcagttccggtgcgatgccggggccgtcgtcctccacctgcaggcacagccagccgtcattgactgtgctggcgatgcggatctgccgacgcgcgtaacgcagcgcattgccgagcaggttgcgcagcgccagttccagcatgtgccggttgacgttgaccaggcccaccggcgacaacgcctgctgcaccggcatcggcaacggtgcgaactgggccaccacgccgcgcaccagcgccgccagctgcaggcgctggcgggtcagctgatggcagcggcccagtgcggcgtattcgacgccggcatcggtgaggtgctgcagccgatcgacgtcggtgcgcagcccgcccagcgcatcgcgctgcacatcgtcgagcgcggtgtcttccaggtcggccaggccgaaacgcatccgtgccaacggcgtgcgcacctcgtgcgcgaccgcctgggccagcacgcgctggctttccagcagctgctgcagctgctcggccatgtggttgaaggcgttggccagcggccgcaccagcgcggtgccggcgcgcggcgcacgcgtgtccagctggccgtcgcgcatgcggcgggccgcctgggccagctgcgagacgtcgcgccacagccggtacaccatcacgtacatcggcagtgccaccgctaccatcaggatcagcagcaggatcgccacaccggatacttcgctgtcctgccagccttcgtccggcagcgcctcgtccaacgggcccagcatcacggcgtagtcgctgtcgccgatccgctgcaggctgcgcatgtgctccaggtcgatctgtacgcggccgttgttgaacggcgggcgctggctggccggcagcgccttcaccgcctcggccagcggcaccatgcgcagcgcgtaggcgaaatcggcgtcgagttcgcgcgccagtgccggccactgctcgcgcggggtttcggcgaagcgatgctgcagcagcgcgtgcgtgccgcgcatctcggcctgcaggccggcttcggtgcggtcttccagcagggcgtcccaggcccacaggcccagcacgatcaacaacaggtgggcgaccaggaaaccgatgccgtagcgcaggaagtggaaggcgtggccgcgcatcgccgagggtgtgcgtttcatccccatgccgagcggctgaacaggtagccgcggccacggacggtcttgatccgttccggctgctccgggttgtcgcccagcttgcggcgcaggcgcgagatgcgggcatcgattgagcggtccaggccatcgaaggcgatgccacgcaggccgcgcagcagcgcgtcgcggtccaggatctggccggcattgctggccagcaggaacagcaggtcgaactcggcggtggtcagctccagcaggctgccctgcaggtgcacgttgcgggtggacgggtcgatgctcagctcgccgaagcgcaggctgccgtcacgcggttcgacccggcggtggcggcgcaggtgggcgcgcaggcgggccagcagcacccgcggttcgatgggtttgccgatgtaatcgtcggcccccagttccaggcccagcacctggtcgatgttgtcggtacgggcggtcagcacgcagatgatgccgtcatagtggggccggatctgccgacacacttcgaaaccatcctggtcgggcaggcccacatcgagcagcaccagggccggcttctccgccaggatccgggccacggcgcgctcgccgctgcgctcgtgggccacctggtagccatgccgttgcaggtagtcgctgaccatcgttcccaggcgggcatcgtcttcgaccagtacgatatccagcatttccaaggcctccgtgggcgcaaacgtaccgccacggcacgagcgcggcgatgctatcccagccttcgggccgcccgggtcctgggggcgggcgccattcagccggggttgctggcgcgcgggccgggtctcagtcccggcaacaacttggcggccagcatagcctgttgctgttacaaaacgttaccttcgtgatacggctggtgacgatcgctgacagcaaagcgactgacgccgcgcgcccccgcgccgagcatggagtctcctccgctccgcgtgccgtccccatgtcgcccgccgccccctgcctgccgaacccgtcccgccgctgccagtgcggaggcttccgatgagcggcgtggtcggggcctggctgccgcccgccgaggatgagcagctgctgcagcagctggccccgatgctgcgcgcgctgcagcagcgtgggcgtggccgcatcggctactggaccgacgccgaggccggcctcgcgctgggccattgccgggcgccgaccgatacgccgttgcagccgctgagctcggactgcggtcgctacgtgctgtgcctggacggccgcctgtacaaccgcggcgacctgcaggcgcagctgcgcgatctgccccgcagttgcagcgatgcgcggctgctgctgcaggcgatcgtcgaatggggcgtgcagcgggcgctgtcgcgcatcgaaggcgccttcggtttcagcgtctgggaccgggagtcgcgcgtgctgtggctggcccgtgatccggtgggcgagcggccgctgtattacggctggtaccagggccagttcctgttcgcctcggagttgaaggcgctgcaggccttcgccggcttcgcgccgagcatcgaccaggatgccctgagcctgctgctgcgccacgactatgtgccggcgccgcacaccatctaccgtggcatccacaaactggtggcgggcgcgatgctgcgtatcgatctcagcgaccatgccgcgggttgctccagccaggccgcgcagggcggcgcgcgttactggtgcgcacgcgacgcgatgcagagtgaactgcaggagccgctgcagccggcgccgagcctggaacaggccaccgaccagcttgaagcggtactgcagaaggccatcgcctcacgcatgcactcgcccctggcgtgcggcgcgttcctgtccggcggtaccgactcctcgctggtgacggcgatgatgcaggcacaatcgaccctgccgatcgaagcgtggacggtcggcttcgacgatccggggcatgacgaaagcgactgggcgtcacaggtcgcgcgccatctgggcgtgcaacaccacctgcatcgcatggacgcgcgccagggcctggacctgctgcagcgcctgccgcaggtctggtgcgagcccttcgccgacgcctcgcagctgccgacgctgctggccagtgaactgctgggggcgcgcaagccggtggcactgaccggtgacggtggcgatgaactgttcttcgggcatcccagctatggccgcgcgctgcgcaatgcgcgcctgtgtggtggcctgccggactgggtacgcgacctggcgcggcgcagcggcaaccgcatgaacgtcgagcgcggccgcctcggtggttggcgcgccctggtggccgaggtggctgccaatgatgtggaaggtcactacctgcagcgcgtgacccgctggcggcagccggcgcaggtggtgctgggtgcgcgtgagccgttgacgatcttccagcagcaggacacggcgctgccggccgaggcgcgcatccagctgctggatttccgcatggacctggccgagggcatcctggccaaggttgatcgtgcgggcatggcggcgggcgttgaaacccgcgcgccgctgctggacatggaggtggtgcgcctggcctggcggctgccgcagcacctgaagtatcacgatggggagcacaagcggatcctcaagcatctgctggcacgctacctgccggagccgctggtgtaccgccccaagcgcggcttcggcccgccgatggcccgctggctggctggtccgttgcgcgactgggcggaggcgctgctggatccgcagctgctgcgcaatcagggctgcttcgatgtggcgcgcgtgcgtagtgtctgggaggcgttcctgcggggcgagcgaaagtggcacacacacctgtggaacgtgctgatgttccaggcgtggcaccagcactggcacggtggtcgcgggcgctgagccgttcctgcatcgcgtgcggcgggttcaatctgcgcggcgcagggcggatgcccttgcgtacgaatgtcctccggcgccggccgttggccgtcacctccccctttacttcgtacgcaagggcatccgccctgcgttcggagttcgccggcgcctccttgaaaggcggccgcgagcgctgtgatctcctcgccggaagccgagcctcgtcggggcgggcagggcccatcggttcgcggcggatcaggacgaagacatgcgtgcggcgggttcattctgcgtggcgccgggcggaggcccttgcgtacgaatgtcctccggcgccggccgttggccgtcacctccccctttacttcgtacgcaagggcctccgcccggcgttcggagttcgccggcgcctccttgaaaggcggccgcgagcgctgtgatctcctcgccggaagccgagcctcgtcgggacgggcagggcccatcggttcgcggcggatcaggacgaagacatgcgtgtggcgggtgcattctgcgcggcgcagggcggagacccttgcgtacgaatgtcccccggcgccggccgttggccgtcacctccccctttacttcgtacgcaagggcctccgccctgcgttcggagtttgtcggcgcttccttgaaaggcggccgcgcgtgctgcgctctcctcaccgcacgccgagcctcgtcggggcgggcaggggtctgggcaaagtaaaggaggaggtgacggccaacggccggcgccgggggacatttgcccagacccctgcccgccccggcggggcccttcagcctgcagagacgtcgcacgaagacgcgcttcggtatccaaacgacaagcaaaaaaagacccggcagagggagggatctgccgggtccggattgcgtggggggagggacccacgcaatgagtgttgcgtcgcgtcagtggttgttcgcgtccgccgttgattcgttgtagccctgcaccagctcggaccaagccttgctggcctgcaggccgagaccgaccacgtcctgctgggcctggcccagccgctgcaggttgtcctgccacagctgcgcgcccttggagagcgtcccggccgcatcctcgccgcgggccagttcacccagccagccgccggtcgcagtcaggttgcgctccatcaccttcagctgcacgccgaacatgctttccgcgttctccaacgccaaccggttcgcacgcgttgccgcggcggcgagctggcgggtggcatcactgaagcgatcgctgaaggcggcggccatggggggcgtcagggagtggcttgatgcattgcagcatacgcccttgatgcggcaatgcaacaaaaataacaaaggcgcccggggcgcctttgaaacacctttcagatcaatgggttgatcaggcagtggggccgcggtaacggcaccccgacgtgcaggtttcgtgcacggtgatctcgctcagcgccggcaggccgggcttgagctcgttccagatccacaccgccaggttctcgctggtcgggttctccaggccggggatgtcgttgaggtagtgatggtccaggcgatcgtagatcggctggaaggccgccttcacgtcaccgaaatccatgatccagccggtctgcgcacccggctcgccctcgaccttcagttccacccggaacgagtggccgtgcaggcgcgcgcacttgtgccccggcggtacgttggggaggcggtgcgccgcctcgagcatgaagactttgaagatttccatggcgcaattgtacgccgcaggtggccggccatcctgagcggatgccgggctctcgtgaagtaactctttccatccggatgaagagatgatagtttctcttatatccgtatgaagagatgttattggccggacccgggccaggcatggactactgcggaacttcatcgcccttaccacctcccccacatcgtcatgcccaagcacaccctgctcgtggcggccctagccgtcgctctggccgcgcctttgtctgccgccgccgaaacctccgccgacgccagtggcgaagccagcaccctggccgccgtgcgtgtcaccggttccaacatcaagcgcaccgataccgaggcctccaacccggtgcaggtgatcggccgccagcagctggaacagaccggcaaggccaccgtggccgatgtgctgcgttcgatctcggccaacaccggcaacgccagcaacgaaaccaccaacaacggctgggcctccggctcggccggcatcggcctgcgcggcctgtcgcagaagaacacgctggtgctgctcaacggccgccgcctggccaactacggcttcccggccggtggcctgtccgatacgttcgttgatctcaacgcgctgccgctggtcgcggtcgagcgcatcgaagtgctcaaggacggcgcctcggcggtgtacggttccgacgccgtggccggcgtggtcaacatcatcacccggcagaacttcgaaggcgccgagatcggcggcagcttcggcggtgccgaccagggcggcctgcacgagcagaacctgaagttcgtcggcggccttggtgatctcgacaccgatggctacaacatcctcttcagcctgcagggttacaaccgcgaacgcctggaccaggacgaacgcaacctgaccaggagcggcatctacaccgacaagcccggtggccgctggaacggctggtcggccaagggcgcgcgctacctggtcaacggcgtgtcggtgccgatgctcgacgccaacggcaactgcccggtcggtaccacccgcgtcgccagcgcgccgatcgacggcctggccggcgacacctgcggcttcaaccaggccccgttcaccacgctgatcccctcgaccaagcgctaccaggcctatgccaacggtaccttccgcctgaacgacaacgtcgaagccttcggcgaagtgctgtacagccagatcaagagtgccgcgtggttcggcagcagcccgttcttcaccctggagagcggccgcttcgcattgaacgccaacagtggcctggccgaaccggtgtcgtcgctgctgccggccaacaatccgtacaacccgtacggccgtgcgatcccgatcgaatacaccttcttcgacctcggcggcacgatcaagaccaaccgttccaccgcctatcgcggcgtgttcggcctgcgtggcaccactgcgaactgggactgggaagtggctgcattcggcgcacgcagcagcgagcgtgagagcgtgtccggcggcttcgccaatcgctgggcgctggccgatgcgctggccaccggcagctacaacctgctgaatccggcggccacgccgcagtcggtacgtgattcgatcaacatcgccacgctgcgtccggccgagtccaagctgcagggcgtcgacgccaagatttccggcagcctgggccacacctgggctggcgagatcggcttcgccgccggtgccgagtggcgccgcgagaagctcgattccaacaacccgtggcagatcgatgccggcctgcaggtgcgcccggccatcgccgaagtacatggccagcgccaggtcagtgccgcctacgccgaagtgaacgtgccgctggcctcgaccctggaactgtccgccgccgcgcgtgccgatcactacgatgatttcggcgatgcgttctcgccgaagatcggcctgcgctggcagccgctcgatttcctgctggtgcgtgcctcggcgtcgaagggcttccgtgcaccgtcgctgtcggagaactccaacagcaccagcatcgcctacggcagcgtggccgacccgcgtgatccggacgtgccgggctcgcgccagaatccgaccttcttcaccgttggcaacaacgcactgaagcccgagcgcaccaagagcgtgaacttcggcgtggtgctgtcgccatgggccaacaccaacctgagcgtggactactaccgcatccagctggacaacctggtcggcaccaacaacacccagaccctggtcaacgacaacgtggccggcgccgtgcagcgcgacgagcgcggcaagctgcaggccgtctacaaccgctaccagaacctgagcgagctgaagacatcaggcatcgacgtcgagctgcgccagcgcatcccgaccgctgcgctcggcgacttcactgtgtcctccgcctacacccacgtgcgcgactaccgtcgcccgaccgtggtcggcggcccgctggtcgactacgccggcagcaacctcggcgcgaccctgcccaaggacaaggccaccaccaccctggactggaaacacggcgacttcaacgccgcggtgacctggtactacaccagcagctaccgccaggaggccagcaccgccgccaaggccgtgcagcagcgcgtcggcagctacagccagtacgacctgtacctggcctacaccggcatcgacaagctgacggtgtacgccaaggtgcagaacctggccgacaagacgccgccgtacgatgcctcgttcccgggcatccgcgcgccgtacgacttcagccagtacgacctgcgcggccgctacttcacgctgggcttcgactaccgcttctgatccacccgctgcgaccggtctccccaggggaccggtcgcgcgaccgtctgccgttgtgttccaggggagtcactgtgtccttgcatcgtcgtgccgttcttccgttgctgcttgccgccgccaccgcactgttccagccgcagccggtacaggcacagagcacctacttctttccgcaggctgccgatgcagcggcgttcgataccgccgtgcccacgccggagcagttcctcggctatccgatcggcagccgttacacccggcacgaccagctggtggcgtacttccaggaactggcccggcgctcggacaggatcagcgtgcgcgagatcggccgcagctatgagggccgcccgctgttgatcgccactgtcactgccgcaggcaaccacgcgcggttggaacagatccgccagcagcacgcgaccctggccgatccggcgcagccgcgcagtgcggcggacgacagcccggtggtggtgtggctgggatacagcgtgcatggcaacgagacctccagtgccgaggcggcgatgctgacggcttactacctggtggccaaccgcagcgccgaaacccagcagtggctgcagcaggcggtggtgctgttcgacccggcgcagaatccggacggtcgcgatcgtgccgccaactggcacaacgcgtgggcctccgatccggcctcggccgacccggccgacaaggagcacgtcgaaccgttcccgcaagggcgcaccaaccactacttcaccgatctcaaccgcgactggctggcgctgacccagcaggactcgcggccgaaggtggaggtgttccaccagtggtacccgaacgtgcagatcgacttccacgaaatgggcaaggacagcacctactacttcgagccctcgccgaagagcatgcacagtccgctgattcccgcggcgtcgtacgaattcaacaagaccctggccaggtaccacgcgcaggcgctggatgcgctgggctcgctgtactacaccggcgagaacttcgacaacttctcgccggtatacggctcgacctacccggacttccatggtgccgtcggcgtgaccgtcgaacaggccagctcgcgcggccgcgtgcaggaatcggtgaatggcctgctgacgttcccgttcaccatccgcaaccaggtcgccaccgggctgggcacggtgcgtggcgcagtgaccgagcgcagcggcctgttcgacctgcagaagcagttcttccagagcgcgctgaagcaggccgcacagcagccggtgaagagcttcgtgttcggtgatgcgcatgacccggccctgacccgtcgcctgctggaactgttgctgctgcatcgcgtcgaggtgcgcgcgctggatcgtgccgtcactgtcgatggccagcgcttcgatgccggcagcgcctacgttgtgccggtccaacaggcgcagttccgcctggtgcattcgatctttgccgagacgccgccgatcaagggtgatgtgttctacggcagcaccagctatgcaatcgcaccggcctacggcgtggccttcgccggtagccgcagccgtatcgaaggcggtgcacgcgtgaccgcgctgccggcggcgcagggcgcggtgctgggcagccaggccggatttgcctacgcgatcgactggcgcgactacaacgccgggcgcgcgctggctgcactgcagggcaagggcgtgagcgcacgtgcggcattccagccgttcaccaccgcgaccgcgcagggcgaggtcagcttcgccgccggcagcctggtgattccggtggccgggcaatcgctgcagggcgcagcgctgcttgaggcagtgacgtcggccgcgcgcgaggcgggtgtgcaggtgcacgcattgcccagcggccgcagccgcgaaggcatcgacctcggcagtgacggcgtcaaggcgctgcgcaagcccacggtcgcgctggtgatgggcgagggcgtggccgccaccgagatcggttcggcgtggttcctgctcgaccagcagctgcacctgcctgccagcaagctggacccgcagcagctgggcaaggtgccgctggaccgctacaccacgatcgtgctgtccggcggcacctacaccggcatcgatgccacggcggtggccgcactgaagcgctgggtgcaggccggaggttcactggtgacctacggcagcgcctcgaagtgggcgatcgaacagaagctggccgacggcgagaagctcggcaaggaagaagagactgccgacgagagccgccgtgcgttcggcgaccagcgcgacatcgccgcgatcgagcgggtcagcggcaacatcctcagtgccgacgtggataccagccatccgttggcgttcggcgtgccgcgccggcaactggcgatcaacaaggaaaacacggtgacgctgcagccaagtgcgaacccgttctcgacggtggtacgcatcgacgcgccgccgcgggtgaacggttacttgtccgagcgcaaccgcacgcgggtggcgggcagcgcgtggctgctggtgtcggcgcaggggcagggtaacgtggtgctgttcgccgatgatccggcgcatcgcaagtactggcatggcacggaccggctgctgatcaacgcgatcttcttcgggaatctggtaaatccggcgaaagcgcggggttgaggtgtttggtgccgagtttctgttgtgcttgggaggcagggggcctcagccaggacacgccgtaaacccatccatgggggctcgatggcgccatccttggcgccaacggtcctggctgaggccccctgcctcccatgacagtttcctgcgggcgcggacgcatcagaccccaaggcgggagcaagggcaaatacaaaagcaaaagcaaaagcaaagccaggaattgcgacttcggcttttgcctttgaatttgaatttgaacttgaatttgatctttcttctcccggctacccggcgggagaagaaggcgcaggcaatgcttgaagcggatgggcatggggacagcgcagaaccgttggcgccatggatggcgccatcgagcttacatggacgcatttacagcgtgttctgcgctgcccccatgtccatccgccctcggtactgctaccgcgtgctttgtcacccggtagccagcaacaaaaaaggacggcgcgtcagcgccgtccctcggtaagaagcccccgcgcagcgggaagcaccctccctgtcagcggggatcagccggcgcgaccgccgccattgccaccgtggccgcggccacggccgccaccattgccgccaccgccaccgccaccgccacgacgctggccctgacccgcgcccgcaccggcacgctgctggccattgccaccgccctcgcggcggccaccaccggccttcttcgggccagcatgcgcatggcgcggcgcatcgccgtgcggacggcgcgcgtggctcttgcgcggtgcgcgctcaccggtatcgtgctcggccttgcccggcgcactgttgccccagcggatcggcgtctgcagctcgaagcccggcacatcgcggatgtccatgtcgcggcccagcaggcgcacgatcgcgcgcagcagcttcacttcatcctgcgccaccagcgaaatcgcctggccggtcgcgccgttgcggccggtgcggccgatgcggtgcacgtagtcctcggccaccatcggcaggtcgaagttgatcaccttcggcagctcgttgatgtcgatgccgcgcgcggcgatgtcggtggccaccagcacggtcacgcggccggccttgaagtcacccagcgcacgcaggcgctggccctggctcttgttgccgtggatcgccgcggtcttgatgcccgacttttccaggaacgtggccagcttgtcgctgccatgcttggtgcgggcgaacaccagggtctgctcgcggctgtcctgcgccagcaggtgcagcagcaggtcgcgcttgcggccggcgtcgaccggatgcacgcggtgggtgatggtttcggccacggtgttcttcggcgtcacctggatctgttccgggttgcgcatgaactccagcgccaactggcggatgttgtcctcgaaggtggccgagaacagcagggtctggcggttctgcttcggcagcttggccaggatgcgcttgatcgacggcaggaagcccatgtcgagcatgcggtcggcttcgtccaggatcagcacttcaatgccggacaggtcgacgctgcgacgctcaaggtggtcgatcaggcggcccgggcaggccaccagcaggtccacgccacggcgcaggatgtccagctggttgcccatgccgacgccgccgtagatgcaggcgctggggatgcgcaggtacttgctgtagccacgcaggctgtcatgcacctgggtggccagctcgcgggtcggggccaggatcagcgcgcgtggcttgcgcgggccggcacgtacctcctgcgaggcggtgcccaggtgctgcagcagcggcaggccgaacgcggcggtcttgccggtgccggtctgtgcgccggccagcaggtcgcgaccggccagcgccagcgggatcgcctgctgctggatcggggtcgggttttcgtagccctgctcggcgagcgcgcgcagcaggaagggcgccaggcccagcgattcaaaagacattgagtttgctccaagtacaagaaacgcctgtccgagcggacagacgggggcagatcaaactgatcggctgactcggagcgttcccgtgaaccgcgctgcgagaattgggtgcagccggcacgaagcgcaggctggaatgcgtgacgaacggcgtcggagtgggggcgggcgaagagggcggaccctggtcgccggcgatcccggagggaaacggacggccgctgcagaccctgcaagtctaaacgatgttcgagacttcgcgcaaaaaggcctgttcaggtaggggcgtctctgcagggcttgcagccctgcacccgcagaggccagagccacgtcaacgtcaaaagctggcttcctgagggttggcggggtgggtccggttgaggggggcgccgtaaacccatccatgggggcttggtcgcggcatccatgccgctcacaccccctcaaccggacccaccccgccttcgacagttttccgcgatctgtcgaatctcattcgatcaatttcggtgtctgacggatctcgacgatgaatgatgtggatgttcgatcagtcatggggaacctgtcgggggtggggcggtgtgggcgggcaggaccgttggcgccatggatggcgccatcgagcccccagggatgggtttacggcgtgtcctgcccacccacaccgccccgccatcccacggaatgcaggcttttgacgttgcggttgcttctgcaggtgcagggctgcaagccctgccgacccccccactacggtagggtgggccgatgccgcgctgcagcttggcgccgccgcagatttgattacacttgaaacttgtttgcccacgactccggacacccacccatgaagcttggttctttgaaggaaggcggccgcgacggcaccctgatcgtcgtctcgcgtgacctgcgccacggcgtgcgcgccaccggcattgccgccaccctgcagcaggccctggaggactggagccacatcgcaccgcgcctgaacgccctgtacgaatcgctcaatgccggcgatgccgatggcgtgttcgacctcgacccgcaggcactggccgcaccgatgccgcgcgcctatgagttcgtcgatggcagcgcctacctgccgcacgtcgagcgcgtgcgccgtgcccgtggcgccgaggtgccggagagcttctacaccgatccactgatgtaccaggccaccagcgccggcttctacggcccgcgcgatgcggtcaaggtggtcagcgaggactacggcatcgacctggaagcggagatcgtggtgatcaccgacgacgtgccgatggcggcgaccccggaacaggcagccggtcatatccagttggtcggcctggtcaacgatgtctcgctgcgcaacctgatcccgggcgagctggccaagggtttcggcttcctgcagtccaagccgcgctcggcgctgtcgccggtgttcgtcacccctgacgagctgggtgccgcgtggcaggacagcaaggtgcacctgccgctgctgacccacatcaacggccagtggttcggtgcgccggaagcgggcgtggacatgcagttcaatttcgcccagctggtttcgcatgcggccaagacccgtccgctggtcgccggcaccatcgtcggctcgggcaccatcgccaatgaagacaccagcaagggtgcgtcgtgcttcgccgagcagcgcgtggtcgaaaccctgcgcgatggcaagccgagcacgccgttcatgtccttcggcgacgtggtccgcatcgagatgctcgatgccgcgggcaacagcatcttcggtgcgatcgagcagcgcatcgaacaggcggccaggccctgagcatggaggcggccatggagatcccggtcgacgacggcatcgtgctgtacacctactggcgatccagcgccgcctaccgcgtgcgcatcggcctggagctgaagggcctggcctgggacgcgcggccggtgcacctggtgcgcgagggcggcgagcagcaccgggatgcctatcgggcgctcaacccgcagcagctggtgccgaccctgctgcatgaggggcatgtgctgacccagtcgctggcgatcctcgaatacctggacgagcgctttccgcaggtaccgctgctgccggccgacgccgctggccgcgcgcgggtgcgcgcgctggcccagctggtagcctgcgacatccacccgatcaacaatctgcgggtgatgcagtacctggaacgcagtctgcagctgccggccgatgcacgcacgcagtggaccctgcactggatcgccgagggctttgcggcgatggaggcgctgttggccaacagccgtgacaccggcgccttctgccacggtgaccgtcccggcctggccgacatctgcctgctgccgcagctgtacaacgcccaccgcttcggcctggacctggcaccgtacccgaccctgcgccgcatcgaatcggcctgccaggcagtggatgccttcgaccgcgcacgcccggaaaaccagcccgacgccgcctgaaaaaaaggggacggaggggattaagtcgtatatgcacttacgacttaatcccctccgtcccctttctgccgcaaacgggccaggtcatcgcggaacacccggtaggcttcctcgcggcgcgcatcgtcggcctgccgcaacacccatgccgggtgcaccgtggcgtagccgcgcgtgccgtcctcgagggtgtgccagcgtccgcggtcgcgtgcgaggtcgaaaccacgaccgaataccgaggctgcggctgtcgcgccgaggcatacgatcacctggggccgcacgcgtgcgatctcacccatcagccaggggcggcaggcctggatgtggcggctttccggccgcttgtgcagccgcaccttgccgcgccgctcatggtggaagtgcttcaccgcgttggtgaggtacagctgggcgcgatcgattcccagttccgccagtgcgcggtccagcacctggccggcaggtcctgcgaacggctgcccgcgcagatcctcggtatcaccgggctgctcgccgatcaccatcacccgcgcatcggcaggcccctgcccgaacacggtctgcgtggcctgctcccatagcgggcactggcggcaggcactggcctgtccgcgcagattgtccaggctgctggcatcggctgccggcgtcgcagcgttcgcacgcgggggaatcctgcgttgcgttgcctgtgccggccggtcatgcatttcctgcacgcggtcggccgcgtcgcgcaccaggcgtggcagcaactgtgcttcaggcaggtggcgccagtactttgccggcatctcctgcatcatcatccgtgtgttgagccgcgccggattgaagatgctggcgtagtaggtctgccacagcgactcgcgtgcatcctcggccggggcatcttcgcgccgtgcaccggggccgaaggcaagcgcctgcccatcccaggcgacgctgcgcgaaggggtcaggatcgcccagcgcatgcctgtgaagcggcgcgcgaagaacggcgcgacccggtcgacgatgtggtgttgcggctcgaaccaggcgatgaacgcatcgggctggccaggtacctcgcggaagcgcacgaatgccttcatcttgtgcgtgtcacggcggacggcctgggcgagggctgtcgcgcgcaggacatcggcgtcggcggggttgcccagcactgatcgctcgccatgggcgatgcgccacagcaggcgatacagcacggccaggcgctggggatcgcgatggcacaggcaggtggccgccagctccaggaagtcacgtggaacgttgggtgcaccggcatcggcaagcatcggcgcctgctgcacggccggcgcatccagcagcgacgtgtcactcccttccagccagtccagctgcggcggggcaacgccgcgcagcaacgcttcgcgcgcagcatcgcgccaggcctgcagcgaccacggcggatccacccgcagcgaccaccgctgcgcgtcaggacgcagacggggcatcgaaaagcgaaccctggcgcggcggcggggccagctgcgcgcgcagcgccgccggatcatccagtgctttgcgcgggtgatggtcggccagcagcacgaacggcagcagcttgctcatcggtgccttcaggcgcgcgatgtcggccacgcgcagccgcccgtggcggcgtgccatcagcacgcgcttgacgttgcgcacgccaaggccgggcacgcgcagcagcatttccttcggtgcccggttcagatcgaccggaaagcgctcgggatggcggatcgcccaggccatcttggggtcgatatccaggtcgagcatgccgtcctgggtggtatcggtaatctcctccacaccgtaaccgtagaagcgcagcagccagtctgcctggtaaaggcgatgttcgcgctgcagcggtggcggctgcagtggcagctgccggctggcgtccggaatcgggctgaatgcggagtagtagacccggcgcatgcggtagttgccgtacagactgtcggcgctggccaggatctgctggtcgtttgccccgtccgcgccgacgatcatctgggtgctctgcccggccggtgcgaaacggggagggcgcgggcgagcgctgcggctggccgtcggcgccaccgctgcgggggacttgcgagcctcattggcttcctcgatgcgccagcgcagttcgcccatcgcgccacggatcgagtgcaccgtcttctccggtgccaaggcgctcaggccggcttcggtcggcagttccacgttgatggacaggcggtccgcatagcgcccggcactggccagcagttccggcgaggcctcgggaatggtcttgaggtggatgtagccggcgtagcggtgttcttcgcgcagctgccgggccacttccaccatctgctccatggtgtagtccgcattgcggatgatgccgctggacaggaacaggccctcgatgtagttgcgcttgtagaagtccagggtgagcgtgaccacctcgtccacgctgaagcgcgcgcgggccacgttgctggagacccggttcacgcaataggcgcagtcgtaaatgcagaagttggtcaacaggatcttcagcaatgaaacgcagcggccgtcgggcgtgtagctgtggcagatgcccatgccctcggtactgccgataccgccactggcgcgcgaatcgcgtttgcccgagccgctggaggcgcaggacgcgtcgtatttggcggcgtcggccagaatggccagcttgcggatggtttccattgaggaaacctacggatgaggggtctcattggatgagaccgcccatgaacgcttcagaaaaaaggggacggaggggattaagtcgcaaatgcacaaacgacttaatcccctccgtcccctttttcgtggggtcagaagccgtgggtgatgctgggtgcgccggccgagaaatcggcgtacgggtcgtgctcgccgctgctgccttcggacaaacggaacttcagggccaggccatcgcgcgagtcggccgcgcgcagcgcttcctcctgctcgatgatgcccgccttggccagccggaacaggcactggtcgaagctctccatgccttcttccagcgagccttccatcgccgccttgatctcgtgcacctggccgcgacgcaacaggtcgcggatcatcggcgtattgatcagcacctcggtggccggcaggcgacggccctccttgttcttcaccaggcgctggctgatcaccgcacgcaggttcagcgccaggttcatcagcacgttcttgtgcgcgctttccgggaagaagttgaggatgcgctcgatggtctggtcggcgttgttggagtgcagggtggccaggcacaggtgcccggtctcggcgaaggcgatcgccgcctccatcgtttccgcatccaggatttcgccgatcaggatcacgtccggcgcttcacgcatcgcgttcttcagcgcgttgtggaaggcgtgggtgtccaggccgacctcgcgctggttgacgatcgacatcttgtgcttgtgcaggtactcgatcggatcctcgatggtgaggatgtgaccggtggtggtgctgttgcggtggtcgatcatcgacgccagcgaggtggacttgccggaaccggtggaccccaccaccagcaccagcccgcgcggggtcatgatgacgtccttcagcacctgcggcaggttcagctcctcgatgctcgggatacggctgcggatggcgcggatgaccatgccgacctcgccccgctgcttgaacacgttgacgcggaagcgcccggcatcgggcagggcgatggccatgttgagctccagctcgcgctcgaactgcggcacctggccttcgtccatcagcgagtaggcgattttcttgaccatgcccggcggcaggccggtgttgcccagcggatagagcttcccctcgatcttgatgtagaccggtgccccggtggtcagaaacatgtccgaagcgttcttttcggtcatcagcttcaggaagtagccgatatccattgcgaattttccccaacgaaacggccgacgcccgttgccagcacggtgtcggcttgacgacaatggccgtgaaccgacaaccggtacggcctccccaatgaaacgacttagcttcgcacgaatgcgccatggcctgtatgtgatggcgtttgcattcgcactgtctgcccccgcctgggcgcaggacgccgccctggaactggcgcaggcccggcaggcggtcgacaaggccacccaggccgacgccgaccagtacgccccggacctgatcggtctggcccggcaggggctggagcaggcccagcgcgccgccggcgaccgccgcgaacggaagaacgccccggcgatggccctgcgcgccgccgccgatgccgacctggcccgcgtccgcagcgaggaagccaccgtcaccgcgcagctgcagctgcgccgcaacgaggtcaaccagctgcaacgccagctgtcgaccggggaggaccgccggtgaagccgatgaccgccgcaaccctggccgcgctgctggcgctgccgaccctggccgtggccgccgacaacccgatggtggcgcagctgagccagcgcctgatggccatccaggccaacccggataccgctgagctgggcgccttcgagcgcatgcaggcccagcaggccatcgcggccctggacaaggccaagcgccgtgaccaggagctggccacctacctggccgagcgccgggtggagattgccgagacggccgtgcgcacggcgatggccgcgcgcgaggtcgaccgcctggagcgcacccgcagcgacctgctgatcgaggccagccgccgcgatgccgcccgtgcccgccaggaagccgaacagctgcgcatgcaggcgcagatgcaggccgaggaagccgaacgcctgcgccaggccgccgaggccgaaaccctggcccgccaggacgccgaaaacgccctgaccagcgtggccggcaagcagcagcagcgcctcagcgccgcccagcagaacgccgccaagctggcccgcgaggaggccgagctggtgtcgggccagaagctgccgggttcgaagttcgatgcgcgcggtgaggtcttcaccttcgggggcgacgcgttcgctgcaggtgcgtccagcctgtctggcggcgcccgcaaccaggccaaggcgctcgccgagtacctgaacatcggcaagaagggccgcctgcgcatcgaggcctacgacagtgccaacggcgtgggccagaagcgtgccgaagcgctgcgcgacgccctggtcgcgggtggtgtcgccagcaaccggatccaggtcagcggcaagaaggcagcctccacccgggcccgttcggccgaggtcatcatcgcgccgtaatgcattgatattgtttgtttttcgttgcaatgagcattcagcctgaaccccgccccggcggggttcggtctttttgtcgcaggggtcttgtaccccgccctgagcaggcgtagggtcaatcgtccgggacgcaatgccgcggaccggacgatgggagggccgggccgatgcaagcagggcgcgaaccgcagcagatcgacgtgcgcaggccagtgccgcaggtcgttgcaggcgtccaggtggccatcgaccggcgctcctccatgaacaacgccccgtgccttgcggccggggcgttcgtgtatctgtcgaaggaggtccatcatgtttgaagatcagccccagagcgagatcgacgcccgtcgcgcgcgtgatccggagttcagggcactccatgaccagcaccgcaagttgaacaagaagtgcatggacgcggagttgggtgtactcccgatcgatgatgtcaccctgggtcgcatgaagcgtgagaagctgctggccaagcaacgccttctgcgaatgtacgaaacaccgctcccaacgacgtcccccacgctttgacgcaccccgtcgcgcccggaacggcgtgacccggccatcgatggccccgccgggcgcttctgccccggcatcgcggcaccgccgatgaggcggccgcgccaaggcaccacaggcggtggtgccttggtctccaggcaccactcaccgatgcgggcggtaccggtctcctcgtcgatccggggccgcccgcatccctttacggggccggcgggcggcatctccgcgccgacctgacattcagcgccatccgtcggataatcatcggtccggccctgcgtggcgcgaatcgaaagtcctccgaatgcccatccattcttccgtcctcgaactcatcggccagaccccgatcgtcaaggcccagcgcctggacaccggtgtctgcgagctctacctgaagctggagagcgccaacccgggcggatcgatcaaggatcgcatcggcctgtcgatgatcgaggcggcggagcagcgtggtgacctgaagccgggcgcgaccttggttgaaggtaccgccggcaacaccggcctgggcctggcgctggtggcacagcagaagggctacaagctgatcctcgtcgttcccgacaagatgagccgcgagaaaatcttcaacctgaaggcgatgggcgctgaagtgcgcctgacccgttcagacgtcgccaagggccatcccgagtactaccaggacctggccaagaccatcgccgagcagaccccgggcgcctacttcatcaaccagttcggcaacccggacaacccggccgcgcatgagttcggcaccggcccggaaatcctcgagcagatgggcggtgacctcgacgccatcgtgttcggctgcggcagctccggcaccatgaccggcctgtcgcgcgcgttcgccaagctgtcgccgaagaccgagctggtgctggccgatccggtcggctcgatcctggccgaatacatcaacgacggcgtgctcaacgacaagtcgggcagctggctggtggaaggcatcggcgaggacttcctgccctcgatctccgacttcagccgcgtcaagaaggcttatgcgatcagcgatgccgagagcttccacaccgcgcgcgagctgctgggcaaggaaggcatcctgggcggttcgtccaccggcaccctgctggcggcggcgctgaagtactgcaaggagcagaccacgccgaagagggtgctggtgctggtctgcgataccggcaacaagtacctgtcgaagatgtacaacgactactggatgctggacaacggcttcctgcagcgcccgcagcacggcgacctgcgcgacctgatcctgcgcccgtacggccagcgcgacaccgtggtgatcggcccgaacgacctgctgaccaccgcctaccagcgcatgaagctgtacgacgtctcgcagctgccggtgatggacggcgagaagctggtcggcatcgtcgacgaaagcgacgtgctgctgcatgtctatggcgacgaggcgcgcttccgcgacaccgtggccaccgcgatggtcagcaagctggaccggctggacgtgaagtcgccgatcgaggccctgctgccggtgttcgaccgcggccaggtggcgatcgtgatggacggcgacgccttcctcggcctgatcacccgcatcgacctgctgaattatctgcgtcggcgcgttcagtaaggcgtttatcgccgcagatcgctgctgaatcccggtttatccgcgtcaaagctcgttaaggccgcgctgatagactcccgctccttcgacggcgccggtcatcggcgccaatcaggaaacgacatgtccaacgcttctttcccggaccgcgcgctggccctggccacgctggccatccacggcggccagtcgcccgaccccagcaccggcgcggtgatgccaccgatctacgccacttcgacctatgcccagtccagcccgggcgagcatcagggcttcgagtactcgcgtacccacaacccgacccgcttcgcctatgagcgttgcgtggcctcgctggaaggcggtacccgcggctttgccttcgcttcgggcatggcggccagctcgaccgtgatcgagctgctcgacgctggcagccacgtggtggcgatggacgacatctacggcggcagcttccgcctgttcgagcgcgtgcgtcgccgcaccgccgggctggacttcagcttcgtcgacctcaccgatctggcggcattcgaagcctccatcacgtcgaagacgaagatggtctggatcgagaccccgaccaacccgatgctgaagatcgtcgacatcgccgcggtcgccgccatcgccaagcgccatggcctgatcgtagtggtcgacaacaccttcgcctcgccgatgctgcagcgtccgctggaactgggtgcggacctggtcctgcattcggccaccaagtatctcaatggccactcggacatggtcggtggcatggtcgtggtcggcgacaacgccgaactggccgagcagatggccttcctgcagaactcggtggggggcgtgcagggcccatttgacagcttcctggccctgcgcggcctgaagaccctgccgctgcgcatgaaggcacactgcgccaacgcgctggcgctggcccaatggctggaaaagcacccggcggtggagaaggtgatctacccgggcctggcctcgcacccgcagcatgaactggccggcaagcagatggccggctacggtggcatcgtctcgatcgtgctcaagggcgggttcgaggcggccaagcgcttctgcgagaagaccgaactgttcaccctggccgagtcgctgggcggtgttgaaagcctggtcaaccatccggcggtgatgacccatgcctcgattccggtcgcgcgccgcgaacagctgggcatcagcgatgcgctggtgcggctgagcgtgggcgtggaggagctgggggatctgcaggtggatctggagagggcgctggcgtgagcagtcgcttggaaaagagatcttccgggctgacgccctatgcaactgcccggcggcggccattggcgggcttcctgcgttcgcccttggagcaccgtcaactcatcttccgtctgatccagcgtgagatcgtgggccgctatcgcggttccttcgccggcctggcctggtcgttcatcacgccattgatcatgctggtcctgtacacgttcgtgttctccatcgtgttcaaggcaaagtggaaggactttgataccagcggtggctttgccttgatcctcttttccggactgatcgtgcacggcgtggtagccgaatgcatcaatcgctccccggcattgatcacgagcaatgccaactacgtgaagaaggttgtgtttccgctggaagtctacgcgtgggtgacgctcggttcggcggtttttcatgcgttcgtcagttggatcgtgctgaccattgcccagttgtgcatgggcgttgcgctgccctggaccgtgatcctgttccccgtggtgatgctgccgctgttgctcggttgccttggcgtttcctggttccttgccgcgatcggcgtctacttccgagacgtggcacagattaccggcacgcttgcgacgctgctgctgttcctttctcccgtgttctacgcgcttgattcgattcctgaacgctatcgtcccctgatccaggccaatcccctgacgggtgtcctggaggcggcacgcaaggtattgatgttcggtgacatcccgtctcctgcgtacttcgggatcggcctgctggtgggcctgctcatggccatggctggttacgctttcttccagaaatctagagatggatttgccgatgtcatctgatccggtcgttctcaagatcgacggcgtttccaagcactatcaggtctacggctcgccccaggaccggttgaaggacgcccttttttcgcgcgctgcgcgtgtcgtgggaagccgaggcaaatcctatggccgccagttcagtgcgctgaaggatgtttcattcgagattcgcaagggtgaaacggtcggcatcatcggacgcaacgggtcgggcaagtccacgctgctgcagctgctgagcggtacgctggcgccatcggaaggccagatcctggtcgacggaagggttgcggcactgctggagcttggggcgggcttcaatcctgatttcaccggccgcgagaacgtgttcttcaacggtgccctgctgggactttcggacgagcagctgcgcagcaagtacgactccattgtcgaattcgccgatatcggcgagttcatcgaccagccggtgaagacatactccagcggcatgttcgtgcggctggccttcgccgtgatcgcgcacgtggaagctgacattctggtcatcgacgaggcactgagtgtcggcgacgcgttcttcgtgcagaagtgcatgcgattcctccgttccttcatgcagaacggcacggtggtctttgtatcccatgacaccgccgccgtcatcaatctctgcgaccgagtggtctggttgtcgcacgggaagatcgttgcagatggcgcccccaaggaagtcaccgccaagtatctggaagatctctacgcggtggagatggccgctgctggtcctgctgcggtggccgttgacgctcccgaaagtgacgcgcaaccggcagctgctggtgcgaccgccatcgaaccggaccacgcaggcatggcgccccgtgatttccgccaggatctgatcaacgccagtgagcatcggcaggaaatccgggtctttgagttcaatgcaaacaaggggttcggacaaggcggggcgcaggtcgagttcgctgcctttgttgacgtggatggcaacccgctgtcctgggtggtaggtggagagccggtccggctgcagatccgctgccgtgtgaaccaggtgttgagctcgcccatcatcggttttgaggtgtacgaccgcctggggcagaccctgttcgcggacaacacgtatgtcgcctccattgatccccctcccggcgctcaagcggggcaggtactggtggcttcctttgatttccggatgcctgtcctgcgcgagggtgactacaccatgagcgcagccatcgcagacggcaatcagcatcaccatgtccagcaccattggctgcatgacgcgcttgccttccatgttcatgcacgtggcatctgccttggattgttcggcgcacccatgcagcgcgtgcgccttgtagtcgagcaacaagatctggtatccgggtgaccggcttcagcagcaatcatgtattgaggtgacccatggcaacccagcttgacgagcacgtagaagatctcgcattcaccggcgaacggttcatgcccgaagtggccggtcagatcgccttcgaacatctccatcgctatcacttcgccgccaggctctgtgccggcaagcaggtggtggacgtggcctgtggcgaaggttatggcagccagatcctgtctggcgttgcggactcggtgaccggcatagatatctcggccgaggccgtcgcccatgcggctggccgctacgggtccgatcgcttacgcttcgtcgaggcgtctgctgccttgctgccattggaggacgactccgttgacgtggtggtgagtttcgagaccatcgagcaccacgaccagcatgaggaaatgctgtcggagatccggcgcgttctacgtccgggtgggatgctgatcatgtccagtccgaacaagcagcactattcgatcgacccgggctacgaaaacccctatcacgtgaaggagttgttccgtcacgagttgatcgaactcatccagcgctacttcccgcagcagcaggtgtattcgcagcgcgtcgtctacggttccctgttggtcgctgacggtccggcggccttcgattcaatcctgggcaccggccctgaaaccagtgaatgggccgaaggcctcagccgcccgctctacgacctggtggttgcgacggatggggtgctgcctgtgcagtcgtcctcgttcttcgaactgaaggttcatggaatggatgccggcgccttctacggggtgcacttgcctgagcgcgtccagaacgcggatatcgaagtcctgcagcttcgcgccaaggtcgaggaactcgaggcccaggcccagtcccatctttcccatcgggaagccgcttccctggaggcggcggaggaactgcggcggacgcgcgaagcgcatctggccgagatcgagcggcttcgtgacagccgcaacgaggtgctgtcctcgatctccgtgctgggttcgctggtcgatgatgttcgccgcgaaggcggtcatgatcggctggcccaggaacgcaggctggaaagcctgcagaatgcgctggatcagaatcgagcgctggttgctgaagcagccagcagccagtcgatcgacaacggtcaattcaaggctcagctggccgaactccgcgagcagttgattcaggccgttgccaccgaggaaagggtccgctccctcgagcgcatgctttccgagtcccaggagatggtgttggggcatatcaatgccaacggcagcctgcgcgaagaaatgtccgctctgcgtgcggaaatcgaccggaccatggccgaacgggatgaggcaaggcagtccgtgcagcagctgcagttggccgtaaccgagcagcgcgtcatcagcgagcaccgcgaacgggatgtggaactgcttaaggcgtcacggagttggcgttacactgcatggctcaggaaactgtcaggaagtgccaggaggcacctgtaagcgatgcatcagggtcagaaaatgggaaaactgggggcagttgcacgccgcatgtacatggcggtgccgggctggaatgcgcggcttgcactgaaggatttcctgttccggaacttcagcttcgcctttgccaatacaaatgcctaccgccgatggaaaaccttcggcgcagggcaggaatttgctgttgtcacggcgggcgcgcagcagccgccagccgctgccgctccgatcgttgccgaaggcgtgaaggtgtcctccgtggcgcgtatctacgcagacgccttcgacgtcgctgcaggcgtgcgcgggtctgagtacgtggagctggcgcctgcgctacagccaccgaccagcctccgcttcaagacgatcgcgttctacctgccgcagtttcaccccttcgccgaaaacgacgcatggtggggcaggggcttcaccgagtggaccaatgtgagcaaggccgtgccacagttccaggggcatcgccagccgcacctgcccggtgaactgggtttctatgacctgcgcttgatcgatgtgctcaagcgccaggccgagcttgccaagctgtacggcgttcacggcttctgcttccaccattactggttctccggtcatcgactgatggagcggccggtggaccagctgctcgcgcatccggagattgacctgccgttctgcatctgctgggccaacgagaattggacccggcgctgggatgggcatgaaaacgatgtgctgattggtcagaactacacggctgacaacgacatcgcgttcattcgtgatgcgatgccgtacctgtctgattcgcggtatatccgcatcgatggtcggccgttgcttatcatctaccggccatcgctgcttcccgatgcccgcaagtcgctggatgtctggcgcggctatgcgcgtgagcagggccttggcgagctgttcatcgccatggtccagttcgacgtcgatgatccgcgcacgtacggcttcgatgcagccctcgagttcccgccgcacaaggtggcgcgtggcctgtccagcatcaaccacacgctggacatcgccaacccgcgttatgaaggctacgtggtcgactaccgcgagatggccgaacgttccaggaactggccggaagaagactatccgctgttcaagggggttacgccacgctgggacaatgaagcgcgaaagccggggcgcggctacacgttcgcccattcctcgccgagcgagtaccagcgctggctggaatcggcgggcgagttcgcactggccaaacctgtgcgtggcgagagcgtggtcttcatcaacgcctggaacgagtgggccgaaggcgcccatctggaaccggaccgttactacggttatgccttcctgcaggcgacgcgcaatgtcaccgccggcacggcgaagccgcgtgtcgcactgatttcccatgatgcgcacccgcatggcgcgcagtacctcgcgctcaacatggcacgcaagatgacggccggcctgggactggacgtgcatgtcgtgctgctcgaagacggccgcctgcacagccagttcgccgagtgctccacggtccacctgctgggcgaccgggatccagcggtgctggccaatgaactacgccagctgggcgtgcgctcggtgcttgccaatacggcggtcagcggccgcatcgtgcaggcgttgggtgatgcaggtcttaccgtggtgtcgatgatccacgagctgccgggtgtcatccagagctacggcctgcagcctgcactggcggacatttcccgtgtggccaagcgcatcgtcgtcgcctcggacgcagtacgcgaaggtttgcagcccttcctcgacccggcagggcaggccaaggtaaccaagctgccgcaggggctgtttgcagccaaccgccatcgcgggaagcgcaatcgagacgctgcgcgcgcagcgctgcggcagcgcttgggtctcaaatccacggacaggatcgtgttgtcggtgggctacgccgatgcgcgtaagggtgtcgacctgctggccgaggcgttcaccagcgcattcgcccagcgacctgatgtccacgtcgtttgggtcggtcaccgtgaagaggctgcgtgtgaggccgcggaaaaggtgctccgccgccatggcatgctggagcggtttcacttcgccggtctcgactttgacaccgatgactactacgcaggcgctgacatctacgcgctcgcgtcgcgggaagatcctttcccatccgtcgtgctggaggccttgtctgtcgagctgccggtcgtcgcattcgcaggcacggggggcggtgcggacctcgtggcccagcaccaggcgggcgtggtcgtgccggcactggacgccgtcgcctatggtggcgccttggcgcgtctgctcgatgaggattcggtgcgagcaacggcaggcgaagccggacgacgcctcgtcaatgccgacttctccttccgcagctacctgctggacttgctggatctggccgggcatcgcattccgcgtgtctcggtggtagtgccgaactacaactacgcccactacctggaagagcgtctggcgtcggtgtacgggcaggacttccccctgtatgaggtcatcatcctggatgacgcctcatcggatgggagcctggcagaactcgaacgcctctggccaacatttgatccggagccgcgccttgaggcgtcgtcggacaacagcgggtcggtcttccgccagtggatgaagggcgtgagcctggcgcgcggcgagtacgtctggatcgccgaggccgacgatctttccaagccagcattcctgcgctcgctggtggacctgctcgagtccaacccccgctcggtgatggcgttctcgcagtcggagcagatcgacgagttcggcgaggtgatggctggcgactatctggaatacaccaatgatctctcgcgtgatcgctggcgcagcagctattcggggatgggttccgaagaagttgaagccggtctggctgttaagaacaccctgcccaacgtcagcgccgtgctgttccgtcgcgaggcgctgctgcgcgtgatgcaggagcacatcgaagagatcactcagtatcggatcgcgggcgactggctggtctacctgctattgctgcgcgatggcggcctcagcttcaatgcggaatcgctcaaccagcaccgccgccatggcaacagcgtgaccatcggctccaaagcgcagggtcacctggatgaaatccgcagcctgcatgcccacgcccagcggcttttcccgttgagcgcagccacgcggagcgcggccgcggcatacgaagacaagctgcgcacccacttcgggttgcggaaccattcagctgggacggagtgattgcatgagcgcgttggtcatcggtggcaatggtttcatcggttcacgactcgtcgccgcgctgcgtacgcgtggtgaagagacggcggtgctggatcgcttccctgcccgcacggacatggactgggctggtgtgcgctactttcagggcgatttccacgacgctgatgtactggagcaggcgctgcaggatgtcgattccgtgtaccacctcgccagctgcactgtgccgagcactgctgatgctgatccgatcgctgatatcgaaggcaatctaatcggtacccaccgtttgctggaggcaatgcgcgtacggggcgtgcgtaggctctgctacttttcctctggaggaacggtgtatggcaaccccgacacccttcccgttcccgaaacgcacgcgctgcgaccgatttcctcctacggcatcgtaaaggtcgccatcgagcactatctgacgatgttccaacgtcagggttggctggatccggtgatcatccgcccctcaaatccctacgggccagggcagtccacgcgcgggatccagggcgcagtggctgtattcctgggacgcgcgctggcaggattgccagtcgagatatggggtgacggggaaaccgtccgagactacgtgttcatcgacgacctcatcgatcttgcgctgttggcaacggagtccggaaggacaggagtattcaacgcggcctctggtaatggcatcagtctgaacgagctctgcgcggcaattcgggtagcttcgggcagggcattgcctgtgcagtacaagcctggtcgcacgtttgatgtgcgatccattgttctcgacgtccagcgcgccaagcagttgctgggctggacaccaaagatcgcgctggcggaggggttgatcctcgcctggcgaagcatgcaggacgcgacgggcagctagattcgcttgaatctccgcgacggcgtcgcacggagacgcaggtgaatgtgcccagcaagcagtcgtgtggcttcatcgaacacaactcagtgtgaactgaatctggcctccagtcctcgtatcgctcgtcttcaagtgcgattcccttcccaactgcagtctcgacgagcgagtctgcggaatttttcgagtatcggcacaaaggaatgagcagaacagcgtcctcccaaacgagtcacttcccgctgatagtggctatctgcgccgccctcggactattcgtgtacgtggcgactgccatgatttcacctctcaacggcgaggatttcgcattgacgcgggatatggccggcgttgcgccgatggatcgtttcggctggatcattgaacgttcgtcggcacagattacgcagtggaacgcacggcttggagaacagctcgcaatcctctggctgagcgtacctcgaatctacttcgtcctggcgacgacagcctcgctgctgttcttctgtgccgtggttgccgtgtatgggcgcaggcaaacggatcgcgattcgttcctccatggctcaatctacgcgctggcgatgctctggttgttctggccgggttacgaagtttttttctggacgacggcccaagcggcctacttccagccgatgattctcacccttctgttgatgtccttttactttaccgccgaggcgacgcagaagcttggtgaatcgaacctccgctgtcttgttgcggtcgtactggcgtgccttgttggcctttcgttcgagaacgtaccgcctgcgctgggtgcgggaatggggctggtacttctgctgagcggaagggctcgctggcgaatacgcgcaattgttcccatcatcgcactcgccgctgcgtggggagtgttgatgctggcgccctccacagcaatccgtcgtgccgcatacgcagccatgtatccagccaacctcggtgttggtcacgtgcttgagcggtcccatagtgtttttggcacgttggtgagtacaggctggctgctcgtgttggcagggacggcggctagcgtttacctgtggcgcgtgcacggatggcggcagcaggtggtgctggcgtggacggtgtcctctctcactgtgctcagtgtcattgccgcgccctacacggagcctcgtgcctttattgttccgtgggcaatctggtacatgctcgttgtcgccgctgtcattcgactggtgtcgatcagttggttccgctcgggtgcagcgattgtagccgttgccagtctttaccttccgctgcaggcgaatctctcatatgttgagtttgcgcgcagcctggaagagagagattcctacatacgaatcatgtctaggaccgagcgctgccagcaaggcattgatgtcgggcatgctactaaagcatattcttataagtatctgaacagtcgcgaagcctggttcgtcgcaaatcctgcttacgtaagcgcctactacggttgcaaggtgctgccgcaatgagcagtcgccgatggatgccattcctgcgatatgcggtcactggtggcctgaatactgccgtgcactggatgatatttgtgcttctggtatggctgggtaacccacagtccatctccaacctctgcgcgttcctggtggcggtcacattgtctttcttcctgaatgctcagtggacattcaaggcccggaccagcatcaagcggtatgtggtgatggttctgacaatggggacgctcagcttcgttctgggtgccgtcgcagatgcgctctcactgcatccgatcgttacaatggtcgggttttctgccgtaagcttggtgattggttaccttattgcaaagttcattgttttccgggaggtcccttgaaaatcagtcttgtcataccggtcttcaatgaacaagaggccatccccatcttttaccgggcggtgcagatgctgcctggacttgaggggcatgatctcgagcttgtttttgtaaatgacggcagctccgatggaaccgagtcggtcatcactgcgctggcggcggcggatcccaaagtcacgctgatcaatttctcgcgtaatttcggtaaagaaccagcattgctggctggcatacacgcagcgcgtggcgatgtcgtcatcccgatggatgtcgatctccaggatccactggagttgcttcccgccatggtcgaaaagttcaaggcaggtgccgatgttgtactcgcacggcgcgttgatcgcggtagcgatggcttcctcaagcgaaacagtgccaactggttctacaaattgatcaatgcgatttcagaaagtcctgtagaggcaaacgttggtgacttccgcctgatgtccaggcctgtcgttgaagcgatcaagcaactgcccgagaaccggctgttcatgaagggcttgttgagttgggttggcttttcaaccgactttgtcgactactcacgacccgagcgctctgccggtgtctcgaagttcaatggttggaagctgtggaattttgcgcttgagggaatcacctcgttcagtagcgcgccgttgcgcgtgtggacgtacgtcggcagcacgattggatttttctcgattgcctacggggtctggattgtgatcgacaagctgctgcatgggaacgcagtgcagggttactcctctttgattgcagccattctctttctcggtgccgtccagttgattggaattggcgtcctcggtgagtacatcgggcgtatctattccgaggtgaagcgtcgtccccgctacatcgtccgcagcacagtgcagcatgagaagaaggactgaacggatggaggctggcgcgtaccgtatgtgggtagcgggactgttggtgagcctggtcggaatagccgggtgctcagaacaggtgcccgaggtgacagttccggccgggatggtccacggcgagcgggcaagcccctccgccgtcatccaaaagccgcatgtcgcgcagggctgcaatcttgagaccgtcaatgggcagcccgtcgcctcgtcaccggtccaggcgtcaaacggtcagattgcattgagtggctgggtcgcgggccagatcgatgatcgtggcgagctggtcggcgagacttcgctggtgttttctgcgggtcccggaaccacggaaattaacgtcgccggagcagatgttcatcaccgtgaggatgttgcgcgttctctcggagagcctgcgttgtccgcggcaggattcgaagctctcctagatggatcaaagctgtcgccgggcacatacgccctcacgctgaagcgaggctcttacgtatgtgcccaaccattcagtctgcagaagggcaattgaagtctgatcctgcacgctccgcgggccacttcctgcacagcggattcacttgtttcatgaggttcgcgtgagcctgcccccgcgcagcttgtcgtacagacgttggccaggtacctccacgaagtaatatgtgaaagctgccgtcactaccacgcaggcgagcgtgaccaaagctgcagtggcaaatgcgagtccaccgtgtccgatgtgcgcatctatttgcgcgtagatgccatgcatctgcaggagttggatcagcgggaactgcaccagataggtgctgtagcttacaaggccaagccagcgggttaccttgttgtcgagccatcgcgggaaacctgacctgccccctttctcagggccactagctacttagtagagtccaggttggggagcataccgctccggtgggtcaggtttcgatcagcggtcgaaccagtcaaggcaccttcgttgcgcagcgcggcggcgaactcggcaggcgtgcatttgggcagtgagctgtgcggacgcacctcgttgtagtccttgcgccagatggcgattaccgcccgtgcgtgctcgagcgagataaaccagttttcgttcaagcattcgtcccggaacttgccgttgaagctctccacataggcgttctgcgtgggtttccctggctgggtcagcacaagcgtcacgccgttggcggtcgcccactggtccagcgcccggccggtaaactcgggtccctggtcggtcctgatcgccgcggggtagccgcggaaacggcataccgcatccaggatgtcggccacgttctggccatttatctgttggcgcgcacttaaaactgacccaggctgcgcgttgaactttgacccacccggtgtacggggctgagggtatcagttggtggtctgggtggtggcctcctttgccctgattctggctttggtcttgttggcggcggtgctgttgcgcagccgccaggagtcgttgccggtctccaggatgtggcagtggtgggtgatgcgatccagcagcgcggtggtcatcttggcgtcgccgaacacctgaccccattcggagaaggccaagttggtggtgatggcgaggctggtgcgctcgtagagcttgctgatcaggtggaacagcagcgcgccgcctgagggggtgaacggcaggtagcccagttcatcgaggatgaccaggtcggcataggtcaggcgcagggcgatctgcccggccttgccctgggcctgttccttctccagcgcattgaccagttcgatggtggagaagaagcgcacgcgcaggcgatgctggcgcacggcctggatgccgatggcggtggccaggtgggtcttgccggtgcccggtccaccgacaaggacgacgttctcgggggtgtggatgaagtcaccctggtggagtcgttcgaccagtgcgcgatcaacgggactggccgcgaagtcgaacccgagcaggtcacgatggacggggaaacgtgcggccttcatctggttggcctgggcacgaacctgccgttcggcggactcggcctgcagcagttcggccatccagtgttcgggctccatggtgtgcaggcgcatcttggccagcagttcgggccactggctggccatgccgtgcagcttgagctgctgcatgcgcagcggcaggtcaggcgtcgacatgatctgcctcccgcagggcgtcgtagcgggccggatcggacaccggcggatgacgcagcgtcactcgcgaggcgaccgtctcgatcgtgcggtccggatgctgcaatcgccccagcacgttgagcacgtggtcggcgcgcaccaggccggactcgagtgccagttccaccgccaccagtaccgcttcgagcccgtgcacgggtacggcggccagcacctgggccatggcgcggtcgccgtgaggctggcgcagcaacacctgctgcagcttgcgcagcggatcgggcatggacaggaacggcgcgccgtcacgcagtgcccccggcttgcgctggaccagggcgatgtagtgctgccagtcgtagtggacccgatcacgctcgaagctgcgccggtggcgggcgacctcggcctcgccgaccaccacggccagttcgaagggatacacgcgcaggctggcgacggcgtgggcgtgttcgcacggcacgctgtagcggttgcgctggaagctgaccagcgcggtcgaactgacccgcaccggccgctcgatgtagccgtcgaagggcgcgggcatcggcatcaggtggggctgttcgtcctccagagcttcggccacggtgatgtcggaggcatccggatgcgcctgcatcggccaagcggcgcggcactcgctggcgagccaggcgttgagggtgtccagatctggccagtggcgggccccggcctcgatccagatctgtcggcgccggtcctgcacgttcttctcgacccgccccttctcccaacccgcggcgcggttgcagaactccgcggcgaacaggtagtggctgatcatggcgtggaagcgggcgttgacccgccgttcccggtgctggccgatcccgtccaccgccgtcttcatgttgtcgtagatgccgcggcgcggcacgccaccgaaggcggtaaacgcctgggtatgagcatcgaacagcatctcgtggctctgggtgggataggccaccaaccagaaggcgcggctgcaggccagcttcacgtgggcgagatccagcggcatcttggcgtggctgccgacgaaggcgtactcgcggctccagtcgaactggaaggcttcacccggaggaaagtgcaacggcacgaaggccgggcggcggctggcgccgccggccgccttccactggcggatgaaggccgtcacccgggtgtaggtgcccggatagccgatcgcctgcaactgcgagaacagcaccttggcggtgcgttgttcccgccggggacgatggctgtcggcacgcagccacgtctccaactgggaccggtagggatcgagccgggagggcgaggctcgcctgggatagaccggctcggactggccgctgcgcagccatcgccggatggtattgcgggataggcccgtgcgcttggcgatctcgcgcagcggcaggccatcgcggaaatgcatccgccggatcttggccaacatgaccatggtgatcactcctgaaatcccccgagcaaaagatgctcaggatgtgggcttcaggtgggtcagttttacccgcgcatcaccgccgaaagtgggtcagttctggatgcgcgccaacacatttatcctccggccgacggcgatttccaccgcttccttggtgcaatcgtccaccaccgtcaggcacttgatcgggcgcccgttggccagggcgtcgaagacgaagtccatcgaccaggtgtggttgggccccgacggcagctgcagcggacggcgctcgacggccacgcgatcgcgcttgcggcgcttgcgcaccgccaggccagcgttgcggtacagccggtagattcgcttgtggttggcgatccagccctcccgttccagcaggatgtgcagccgtcggtagccgaaccggcgacgttcgcccgccaacgcaacgagcctggcctgcaacggcgcgttcgccatgcgcggctggtagtgcaacacgctgcgtgacaagcccagtgcccggcaggcccgccgctccgacaggcccagcttcgcccgcacgtccgcgacggcagcccgtcgcgtcggcgggctcagtattttccccgcgccacgatcctcagcgcttcgttgtccaacatcgactcggccaacagctttttgagccgcgcgttctccgcttccagtgccttcaggcgcttggcgtcgggcacatccatgccgccgaacttgcgccgccacaggtagaacgacgcgtcactgaagccgtgcttgcggcaaagctccttgaccggcgtgccggcggccgcctgcttcaggaagccgatgatctgctcttcggtgtatcgcttcttcatgtccgtcctcttgtgagacggactctactaagatcaggttggcccggaaaacggggggcaggtcaaacccgctatcgacatgccgaccatcaagggcgctgcaatcgaaagcagaacttcttctggcaggccgaacggtgcgtgcaaggaatagatggtgcatgccagcagcgccaggaaagcaacacctacggcttggcgctgcattgcattgcgtgctgtcggcatgccggcacggctgagatgtaggataaggaggccgagaacgaaatattggctgtggaccagtacgttgagtgatgcgaactcgttcagttggccatcaaagctgtcctgcaggtagcgctttgaaagtactgcaatcgggcatagcactacccacgcgagtgctgccgacttgactgtcctgatggtcgaaagcagcagcgggaacatgaagtagaaaagccattcgataccgatggaccaaccgccgccgacgaggccgctctgcttgcctggtacaagcgtaaacaggaagcttcctgacagcatgaagtcgagcagaggtggcatcggttgatccatggccagccgaaaagccacgcctgtgaggatcatgaagtaaaacagcggagcgattcggaagaatcttttctggtagaagactttgatcgcttcggtactgctcatgcgtgaatagtaggcatgaccgatagcaaacgcgctcagcacgaagaacacgcggacgaagaagtccatccttccggtaatggccgcagccgtctcattgatcgggatgcccgaaagatagaggacatgaaacatgaccacgccgagcgccgccaatccgcggaggacgtccggcccgtggatgcggtcttgcatctgattgttcatagtaggacgtgaacccgtgaaggagaaaagggccggctgaacttcagccggcccttggatggcgggaggcctctgcgctgagtcgtcagagcgccttttccagctccggcaggatcgcaaacagatcgcccaccaggccgatatcggcgatctcgaagatcggcgaatccggatccttgttgatcgcgacgatcgtgccggcatccttgatgccggtcaggtgctggatggcgccactgatgccgacggccacgtaaagttccggggcgatgatcttgccggtctggccgacctgcaggtcgctgggcacgtagccggcatcaaccgcagcgcgcgaggcaccgacggcggcaccgagcttgtcggccagctggaagatgaccttgaagttctcttccgaaccgacaccacggccaccggagaccacgcgcttggcgctctgcaggtccgggcggtcgctggcaccagcggcgaggccgacgaagcgggtgtgggtcggcagggcagcatcgacgctggccgcctcgatggtcgcgctgccgccctgggcggcttccggccacgaggcggcacgcactgtggcgaccacgatctggtcggccggggcttccacggtgatgatcgcgttgccggcgtagatcgggcgcttgaaggtgtggctgccttcaacgctcatcaggtcggaaacctggttgacgcccagcagggcggccacgcacggcatcaggtccttgccgaaggtggtcgacgggccgaacacgtgggtgtaacccttggccagctgcgcgatctgcggtgccagcacctgggcgatggcctgcgcgttggcagcgttggccacggtcaggaccttggcgacgccagcgatcttcgcggcctcggcagccacggcagccggatcggcggccagcaccagcacgtcgatgctggcgccgctgatggcggcagcagcgctgacggtcttggcggtggcggcgttgagcttgccgtcgtggtgctcggcgatgacgagaatcctgctcattacagcaaccccttctgcttgagtgcggcaaccagttcggccgcgtccttgaccatcacacccttgctgcgcttggacggcgcggcgtactgggtggtcttgaaggtgtcggcggcttcaacgccgaggtcggccagctgcagggtctccagcggcttggccttggccttcatgatgtccggcagcttgatgaagcgcggctcgttcaggcgcaggtcggtggtgaccacggccggcagatcgacttccagcgtttccaggccggcgtcgacttcgcgggtcaccgtggccttgccgtcggcaaggtccagcttgctggcgaaggtcgcctgcgggcgcccccacagcgtggccagcatctggccggtctggttggcgtcgtcgtcgatcgcctgcttgcccaggatcaccaggtccggctgttccttctcgatcagcttgagcagggtgcgcgcggcggtcagcggctggatggcctggtcggtgactacatggacggcgcggttggcgcccatggccaggccgttgcgcaggtgcgcctgggcatcggccggggcgatggtggcgaccacgacttcgctggcgatgcccttgtcgcgcaggcgcagggcctcttccagggcgatttcatcgaaggggttgggggacagcttgacgccgtcggtgaccacgccggaaccgtccggcttgacctgaatgcggacgttgtagtccaccacgcgcttgtacgcgacgaggattttcatctggtacggggtccttcaataacggagagaacgtccggtcctcgcacagcaaccggttcgggggtgggaccccgattctagctggcttgaggggaccatgcgaatgcgtatggtcctgtagtgatgctgcgccgccgcatggctttggcgtgaaggcagctttctgatgtcatgttcacgtcatgcaggcagtcgtgaaggtttccccgatgtatcctgtcccgctatgtcgggcaccgtgggtgcctgtggacgtcatcattgaacaggagatcaggtagtgcccacatggcttgtcaccggcggtgccggctttatcggcggaaacttcgtcctcgaggcagttgcccgtggcatcaaggtcatcaacctcgacgccctgacctacgccggcaacctgaagaccctgtccagcctggacggcaacccgaaccacgtgttcgtgcagggtgacatcggcgacggtgctctggtgacccgtttgttggccgagcaccagcccgatgcggtgctgaacttcgccgccgagagccacgtcgaccgttccatcgatggcccgggtgcgttcattcagaccaacgtagtgggcaccctggggctgctggaagcggtgcgcgactactggaaggcgctgccagccgagcagggcgccgccttccgcttcctgcacgtgtccactgacgaggtgtacggcaccctgggtgagaccggcaagttcagcgaaaccacgccgtatgctccgaactccccctattcggcgtcgaaggccgcttcggaccacttggtccgcgccttccaccacacctacgggctgccggtgctgaccaccaactgctccaacaactacggtccgtaccacttcccagagaagctgatcccgctggtgattgccaaggcgctggctggcgaaccgctgccggtgtacggcgatggcaagcaggtgcgcgactggctgttcgtgtccgaccactgcgaagcgatccgcaccgttttggccaagggccaggtgggcgagacctataacgtcggcggcaattcggaaaagcagaacatcgaagtggtgcaggcgatctgcgcactgctggaccagcgccgtccgcgcgaagacggccagccgcgcagcagccagattacctacgtcaccgaccgccccggtcatgatcgccgctatgcgatcgatgcctcgaagctgaagaacgatctgggctgggaaccggcctacaccttcgaacagggcatcaccttcaccgttgactggtacctggacaaccaggaatgggtcaacggcgtgctggacggcagctaccgtctgcagcgcatcggcaccgcagcctgaatccaggagatttcatgacccagcgcaaaggcatcatcctggccgggggctccggcacccgcctgtacccgatcaccaagggcgtcagcaagcagctgctgccggtgtacgacaagccgatgatctactacccgctcagcgtgctgatgctggcgggcatccgcgaagtgctgatcatcaacaccccgcacgagcaggcgctgttccagcagctgctgggcgacggttcgcagtggggaatggacatccagtacgcggtgcagccgagtccggatggcctggcccaggcctacctgatcggccgcgacttcgtggctggcaagccgagctgcctggtgctgggcgacaacatcttccacggccacggtctgcgagaagtgctgcgcaacgccgaccagcgcgagcagggcgcgaccgtattcggctactgggtcaacgacccggaacgctacggcgtggccgagttcgacaaggacggcaaggtcatcgatctggtcgagaagccggagaatccgcgatcgaactacgcggtcaccggcctgtacttctacgacggcaatgccagcgactatgcggccgagctcaagccgtcgccgcgtggcgagctggagatcaccgatctgaaccagcgctacctgcgcgagggccatctgcatcttgaagcgctcggccgtggttacgcctggctcgataccggcacccatcagtcgctgcttgaggcgtccaacttcatcgagaccatccagacccgtcagggcctgcaggtgtgctgcccggaagaaatcgcgttcggcaagggctggatcaacgccgagcagctggaagcactggctgcgccgctgatcaagaatggctacggccagtacctgcacaagctcgccctgcgtggagtcgttccgtgaaagtgattgaaaccaagttgcccggctgcgtggtgatcgagccggcggtgttcggcgacgcccgcggttatttcttcgaaacctggaacgccgagcgcttcgccgcgctgggcctgccggaccgtttcgtgcagagcaacgtgtcgacctctgcgcagggcgtgctgcgcggcctgcattaccaatggccgcggccgcagggcaagctggtcagcgtgctggaaggcgaggtctatgacgtggcagtggatatccgccgcggttcgccgaccttcggccagtgggaagcggtggtgttgagcgcggagaacaagaagcagttctggatcccggagggctttgcccatggctttgccgtgttgtccgagcgtgcggtgttcagctacctgtgcactgaggtgtacctcaaggacttcgatgccggcgtgcgctggaacgatgcaggcatcgccgtggactggccggtcagtgcaccgaccttgtcggccaaggacgagaacgcacccttcctgaaggacattgctgaagaccgcctaccggtctacgtgccatgaccgtgctggtgttcggtggcaacgggcaggtgggccaggagttgctgcgcgcgctggcgccgctggggaaggtgattgcaaccacgcgcagcggccaactgcccgacggaagtacctgtgaaacggccgatttcggccagcccgacagcctgccggcattgctggaccgcgtgcagccattggtagtggtcaatgcggcggcttacaccgctgttgatcgcgccgaacaggacgtcgatgcggccttcgccgccaacgcgcaggcaccaggcgtgatcgcgcgctggtgtgcggcgcatggcgtgccgttcgtgcattactccaccgactacgtgttcgacggccagggcagcgcgccctaccgcgaggacgagccgaccgcaccgctgggcgtgtatggcaccagcaagcgcgatggcgaggacgcggtgcgtgcggccggtggccgccatctgattttccgcacggcgtgggtgtatgcctcgcacggcgcgaacttcctgcgcaccatgctgcgcgtgggcgccgagcgcgatgcgttgcgggtggtggccgaccagatcggtacgccgacgccggcggcgctgatcgccgatgtcaccgcgcaggcactgcagcatccgggccagctgtcgggtacctggcacctgaccgccagcggccggaccagctggcatggctttgccgaggccatatttgccgaggcgttggccagcggtgtgttggccaaggtgccgatggtcgaggcgattcccagttccgagtatccgaccccggccaagcgcccggcctggtcggtgctggacaaccgcaagctgcagcaggatttcggcgtcgtgctgccgagctggcaggatggcctgaagcgggtgatggcggagctggcctgacggccgtagcgccgggccatgcccggcgacgcagcgctgccgggccgatcaggaacgggtcagagcccgttgcgcagcaacgggatccgacccggacaaacctcagctgcgcccgtaggtatcctcgaaccgcacgatgtcatcctcgcccaggtagctgccggactgcacttcgatcagttccagcggcagcttgcccggattgcgcaggcggtgggtcacgcccagcggaatataggtgctctggttctcgctgagcaggatcacctcgtcaccacgggtcacttcagcggtgccgctgaccacgatccagtgttcggcgcgatggtgatgcatctgcaggctcagcgtgccgccgggcttgaccgtgatccgcttgacctggaagcgctcgccgttgtcgatcgaatcgtaggcaccccacgggcgatagaccttacggtgccaggtggcctcgctgcggccttcggccttcagctgcgccactacggtcttgacctcctgcatgcggtcggccttgccgaccagcaccgcgtcgtcggtttccaccaccaccacgtcatccagcccgaccagcgccaccaggcgctgtgcgtaggcataggtgttgcggcagtcgatggcgatcacgtcgccctggtgggcgttgccatcgccgtcctgctgcgagacatcgcgcagcgcggtccacgagccgacatcgttccagccggcatccagtggaatcaccacggcatcggcggtcttctccatcaccgcatagtcgatcgaatcggacggaacggcagtgaaggcctccttgtccaggcgggtgaaatcggcatcgcgacgcgcctgctgccaggcctggcggctgccggcgagcatggcgggctggaagcattccagctcctgcaggtagcgcgaggccttgaacaggaacatgccgctgttccagtagtactggccgctgctgacgtagcgggtggcggtgcccaggtcgggcttctcgacgaagcgctcgaccgcgcgcaggccctggccatcggcggccttgatatagccgtagccggtttccgggccggtcggcacgatgccgaaggtcaccagctttccggcttcggcggcagcggcggcagcctggacggcgctgcggaatgcagtctcgttgttgatcacatgatcggagggcagcaccagcagcagcgcgtcgccgccgtcgcgggtggcttccagcgcggccaccgcgatcgccggtgccgtgttgcggccgaccggctcaaggatgatcgcggctggctcggcgccaacctgctgcagctgctcggcggcaacaaagcggtgttcctcgttggcaatcaccaacgggccgcgcgcggcgatcggcgccacgcgcttccaggtagcctgcagcatcgtcagttcgcccgccaacggcaggaactgctttgggtacgcctcgcgcgacagcggccacaggcgggtaccggatccaccggacaggatgacgggctggatgctgctcatgcgttcctcggttactgctggatgaggcgggagatgtcgtcggtacgtgcctgcatcagtgtggcatcgccccgggcttcaacattcaggcgcagcagcggctcggtgttggagctgcgcaggttgaagcgccagtcgccgaagtcggcactgatgccatcggtgtggtccagcgtgggcgactgcgctgcgaagtgctccatcacgcgtgcgacggcggccttggcatcgctgaccttgaaattgatttcgccgctgcacgggtaggcagccatgcggtcttcgacccagtcggccagcgagcgcccgctttcggaaaccagctgggcgatcagcagccacggaatcatgcccgagtcggcataggcgaactcgcggaaatagtggtgggcgctcatctcgccaccgtacaccgcgtcttcggcgcgcatcttttccttgatgaaagcgtggccgctcttgcactgcaccggtacgccgccggcctgttcgaccatgtccacggtgttccagaccaggcgcgggtcgtgcacgaccttgccgccgggattgcgcgccaggattgccttggccagcaggccgaccaggtagtagccctcgatgaagcggccggtatggtcgaagaagaagcaacggtcgaagtcaccgtcccaggcaatgccgaaatcggcaccgtgttcgcgcacggcgtcggcggtggcggcgcggttctccggcagcagcgggttgggaatgccgttggggaagctgccgtccggctcgtggcagatgcggatgaactcgaacggcaggtgcggcgacagcaggtcgacgatggccccggcaccgccgttgccggcgttgaccaccagcttcagcggtcgcagcttgccagcgtcgacatagctcagcaggtgctggatgtacgcgctcttgtcgtgctgcgcgctctgcgcggcacgcggcggctgtgccgcggacgtatcggcggcaaccgcatcggaaatcgcgaacaggccagtatcggagctgatcggtcgtgcgttttccttgaccagcttcatgccgttgtagtccatcggattatggctggcggtgaccatcacaccgccggccgcgcccaggtggtcggtctggaaatagacctcttccgtgccacacaggccgatgtcgatcacctcgcgcccggtaccgcgcagacctgcggccagtgcatcctgcagcgcggggctggtcaggcgcacgtcatggcccagcaccaccgggcccggcgcaagctgcgccgccagggcaacgccgatgcggcgggccaaatcttcgttcagttcttccggcacgcggccgcggatgtcataggccttgaaggcgggcaggggcattgatcgggatccttgggtggctcagcacgcgattgtagtacctgtcttgtatgggaagcgtttccatgccgcaacgccacgtgaccgtctgccgtgctggcctagaatggtgtgattacatcaacgaagtgagggcgtagatgagcaatccggcaacgaccggcggaaagcgcggcaagcgcttcgccagtgcgacggaggccctgcagggggtggtcgccgatggacagaccctggccgtgggcggctttggcctgtgtggcatccccgaggcgctgatcgctgcgctgcgcgacagtggcgtcaagggcctgaccgtgatctccaacaatgccggtgtcgatggtttcggactgggccagctgctggaaacccggcagatcaagaaaatgatttcgtcctacgtgggcgagaacaaggaattcgaacgtcagtttctggctggcgaactggaactggagttcaatccgcagggcacactggccgagcgcctgcgtgccggtggtgcgggtattccggcgttcttcactgccaccggctatggcacggtggttgccgagggcaaggaaacccgcgagttcgacggcaagcactacgtgatggagacggcgctgcgcgccgatctggcactggtcaaggcctggaaggccgacgaggccggcaacctggtgttccgcaagaccgcacgcaacttcaacccggcctgtgcgatggccggcaaggtctgcatcgtggaagtggaggaggtggtgccggtcggtgccatcgacccggaccaggtgcacctgccaggcatctatgtgcaccgcatcgtgcacaacgcgcatcctgagaagcgaatcgaacagcgcaccatccgcgcggagggcaactgacatggcgtggacccgtgacgagatggcggcacgcgccgcccaggagctgatcgatggcgcctacgtgaacctgggcatcggcctgccgacgctggttgccaatcacattcccgaaggcgtggatgtgtggctgcagtcggagaacggcctgctcggcatcggcccgttcccgaccgacgctgaagtcgacgcggacctgatcaatgccggcaagcagacggttacggcgcgtgccggtgccagttacttcggcagccacgacagcttcgcgatgatccgcggtggccatgtgaacctggccatccttggcgccatgcaggtcaccgacaagggtgacctggccaactggatggtgcccggcaagatggtcaagggcatgggcggggcaatggacctggtcgccggcgtgcagcgcgttgtggtgctgatggagcacactgccaagaacggcgagcacaagatcctggccgaatgcacgctgccgttgaccggcgtgggcgtggtcgaccgcatcatcaccgatctggcggtgttcgacgtgactgacaagggcctgttgctggtggaggccgcgccgggtgtcagcgatgaagagctgaaggaaaagaccggcgtcgcgttccggcggggctgaggctgcaagggctgccaagcgtgccgccctgcttcttgaggtgccgccatgctgttcccccacgacctgcccgatgccgatgtcctgcacctgccgggatggctggctgcggccgaggccgaccagctgctgtattcgctgcaggccgaagtgccctgggaaacccatcgcatccgcatgttcggcaactgggtggactcgccgcggctgagctgctggatcggcgacccgcaggcccgctatcgctattccggtgccgagttcgtgccgcgcccctggccgccggtgttgcaggccatgcgcgggcgcctggaagccgaaggccacggccgcttcaacagcgtgctgctgaaccgctaccgcggtggcggtgactacatgggctggcacagcgatgacgagccggagctgggtccggctccggtgatcgcgtcgctgagcctgggcgcggcgcgccgattcctgctgcgacgccgcgacgacccggcacgcaaggctgaattcgtgctgggccacggcgacctgctgctgatggcgggacagacccagcgcttctaccagcacgcgctgccgaagatggcgcgggtgcacggcgagcggatcaacctgaccttccgttggatttcgccgcgttgacgaagaaggggtcaggtccctttccggccggaaagggacctgaccccgtaaccacatgcccggcgaatgctgcgatcagcgcgcaacggtcggctggtcggcctgcccgctctgcagcgtccagcccaccacgtcctgcgccagctgctgcaggccacgctcgaacgcggcggtcaccgccggtacgtcggtgctgccgaccggctgcgcctggcggaaggtgcggtcagcgaccacacgctggtcggcgacatggatcagcttggcgttgacctcgatcaccacggtgggcgtggcctggccctggtaatccgattcgaagcggcgcacatcggtggacagcttgtagtcggcgcggatgccggcggtgctgcgggccacgccgcggatgcggccggaatcctcgaagccacgcagcagggtgtcttcgatcatgtcggtggccggttgcgcccagctggcacccttgtagatctcaagctgcgacggtgtcggccgcacattgatgcgcgggctgtcgaccatgcgcgcggcgctgggcttggccagtaccagctgccagctggcctgcggccacgccgggtccgccttgacctgcacggacggcgagtacagcgtcaccgcggttttctcgctgctgccgaggatggagcagccccccagcagggtgaccatcgaagcggccagcagcaggcgcggaagagtggtcgggctcatttgggttcgaactccttcggtgcgtcgcggcccagcaggtagcgcgcggggttgttctcgaggcggtcgctgacccggcgcaggtcgcggatcaggccgcgcagttcggtaagcgtcgggcccagctggccgaggccatcgttggcgaagctgttgatcgcggcgcggttctcgccaaggatcgaatcggcgttgccggcggccgagtcgagcttggccagggtcgcgtcgagcttgtcgatgatgccgggcagctgctgcaccaggttcctgtccaggcgctcgatggtgccgttggtggtcttcagcgtggtgtccaggctgcgggcggcatcgcgcgcgctgagcagcagcgcctgcgtgccctggtcacggtcggccaggccgccgctgatcgtctccaggttggccagcgtcgcgttgatcgaggccacgttgcggtcgctgaggatctggtccatgcgctcgacgatgcggttggcgacgtcggtgatgttctgcagcgcagagggcgtggtcgggatgatcggtgccgggtccttgttgaccgtggtcagcgccggcgactgcggcgtgccgccgctgagctggatgatcgacgggccggtcaggctggtgatcgccagcttggcgcgggtatcggtcttgaccggcgtgttggagttcaggcggatgcgcgcgactacctggcgcgggtcgtccggcaccaggttcagttcggtgatcgagcccaccgcgatgccgttgtactgcaccgggctgcccaccgacaggccggtcaccgcttcgcggaacaccacgcggtactcctgccaggtacggtcggaggagtatttggcggcccacaggccgaaggccagcagggccaggccggtgatcagggtgaacgcgccgatcagcacgtagttggctttggtttccatggctcaggcactctcgatctgttcgccacgcgcggcgcgcgcgcggggtccgtggaagtattcctggatccacggatgatccagtttctcgatgtcaggcaagggtgcgttggccaccaccttgcggtcggcgatcaccgcgacccggtcgcagatcgcgtacagcgtgtccaggtcgtgggtgatcaggaacacggtcagccccagcgcttcctgcagggtcttgatcaggcggtcgaacgcggccgcgccgatcgggtcgaggccggcggtgggttcgtccaggaacagcaatggcggatccagcgccagtgcccgggccaggccggcgcgcttgcgcatgccgccggacagctgcgagggcagcttgttgatcgcatcggcgggcaggccggccagcttcactttcagcagcgccagttcgtagtgccagcgctcgggcagctcgcgatggtgttccttcagcggcacctgcacgttctcgcccacggtcagcgaggagaacagggcgccatcctggaacaacacgccggtgttgcgctcgatgtgcagccggctctcggcgtcgtcggcacgcgcgtcgcggccgagtacttcgatctgcccggcatcgggcacgcgcaggcccaggatcgagcgcatcagcaccgatttgccggtaccggagccgccgaccacgcccaggatttcgccgcggcgcacatccaggtccaggtcttcgtgcacggtctggctgccgaagcggttgaccaggccacgcacgcggatggccagttcgtggccctggtcgtcgcgcatgtcgatggagtcggggagggcggatgtgctcatgtcaccagtccatgtgcatgaaccacaacgccgcgaaggcgtcgatgatgatcaccagcgagatcgtctgcaccacgctggaggtggtgcgctcgccgaccgactgcgcggtgccctcgaccttcagtccttccaggcagccgatcaggccgatcaccagcgcgaacacgggtgccttggacaggccgaccagcaggtgccgcacttccatcgtctcgtgcatgcgcgcgatgtacatctgcggcgggatgtcgaggtcgaacgcgccgacggtgatgccgccggccaggcccgcgatcatcgcgatgaaggtcagcaagggcagggtgaccagcagcgccagcagtcgcggcagcaccagcaggtcgaccgggtccaggcccagcgtgcgcattgcatcgatctcctcgcgtgccttcatcgcaccaatctgcgcggtgaacgcactggcggtgcggccggccagcacgatcgcggtcagcagtaccgcgaactcgcgcaggaaggcgatgttgaccagctcgaccacgtagatctcggcgccgaagtcgcgcaggatggtcgagccgaggaatgcgatcaccgcgcccaccaggtaggacagcagcgccaccagcggtaccgcatccagccccacctgctccatctggtgcacggtggcggtcagccggaagcggcggggttccttgaccagccgggccgccttgaccaggttctcgccgaggaaactgcacagcgccttgatgttgtggccagtggcgtggacgctgacacccagccgttccagcgcggccagcacgccgaaatcgcgcttgggcttggggcggtcgtcggccacttcctcgatggtgcacaccagcgcctggtggtccgcgcggaactgcagtgcgtcttcgtgcagatcggcacggtgggccacgcgcagcacctgcagcacgccggccgaatccagctgctcgatgccggtggcatcgatgccggtcagcttgtcgggaacgccgtgcaggacctcggccgcggccagcgcggtcttcaaggtccaggtgccggacaggtggatcaggcccgggtcatgggcatcctgttcgagctggggggcgaggttcggggtgacgtgggccattcgggtcgcagcataaccgttctgtatcgggcttcgcgtcgaactcggatgaatttctccggtgggccccagcgtaggtaatactacggcgcatgtccgcagacgctcacacgatccccacgccccaggccacctacgcacagcgcgtggcctttgtttccgagatcgccggacgcctgcacagctatggcaccacggcccagcgcctggaaacggcggtggtggcactggcccgccagctcgatctggattgtgaaccgtggtcgaatcccaccggtatcatcctcagcttcagcgatccggcgcaggcgatcggctccagcgacatcacccgcgtgatccgcctggcgcccggtgagaacgacctgcacaagctcagcgtcgccgaccatatcgccgaagaagtgtccaacgggcggatgagcatcgcccaaggccataccgcgctgcgccagctggacaaggatccgggccggcgcggcaagctgcgcaccatcctgtcattcaccctcggcgcggccggcgtggccggcatgtggaagctgccgtggctggacatcgccaccgccggtgtcatcggcctgatgatcggcctgctcggcatggtcaccgaccgccgcccggccacccgcgaagcggccgaggcgctggcggcgctgctggccggcatggtcgccaccctggtggcgtccttcattggcgcgctcaacctcaatacggtgatcatcgcctcgctggtggtgctgctgcccggcatgtcgctgaccaatgcggtcaatgagctggccagccagcactgggtgtcgggcaccgcgcgctttgccggcgcgctgaccaccatcatgaagctcagcgtcggcgcgatgatcgcggtgaccctggccgacgtgctcgggctggatccggtgatccgcgccacgcggccgcaggggccgtgggtggagtggggttcgctgctgaccgcggcctttgcgttcgcgatgctgttcaaggccaaccggcgcgattacccgtgggtgatcgccgcctcggtggccggttatgcgatctccaagttcggcggccatgcctggggcgcgccggccggcatcttcctgtcggcgatgctgctgaccgcgggcggcaatctgttcggtcgcctggtcgggcgtccgggcgcgatcatccgcctgcccggcatcatcatgatggtgcccggcagcaccagcctgcgcggtgtgctgaccctggtccagcaacaggatgtcggcgccggccagagcgtgttcctcaccgtgctcaacgtggtgatggcgctggtcgccggcctgctgttcggcaacctgctgatgcccgctcgcaagaccctgtgatgatgtcggtgggtgtggaccccggtccacacaccggagaatgaaaaacgccggcgtccgccggcgtctttcattccaacctgatcccggcctcaggccttcttgatcaggaaatcttccggcttcttgttgcccttggcggtcagttcagccatccagcgcggctgcttgccacggccggtccaggtttccttcggattggccggattgcggtacttcggtgcaaccttgcccagcttgcggccggcggtcttcgacggggccttggcggccggggcggccttgcgggcacgcgtggccggggcgctgccgaacagttcttcgatggtgtaaccctcggtcttggccagcttggtcagctgggcccggaccttggtgatcggccggcgcttggcgacgatggtctgctgcttcttggcggtacggatcagggcgcccagctcgcgtgctgacaggccggtcaggtcaatgctcatttacggttactccggaaactaatgtgtggacgggacaagccagtccatggcgtcggcggacagaatagagatgaattaatcacagcacaaatgcaggcgggtcatggcgtggcggcatgcagacgccgtcgcggtgattttgaccggattatgtccgctgcaatatcggggaagggcgcgggcaaaaaaaagaccggggcaggccccggtcttttcctgatcagccctgcagacgctgcagcagggaggccttgtccaggttctccgcgtcgctggcgcggcgcgagcggtactcgtaggtgccagcggccaggccgcgttcgctgaccaccacgcgatgcggaataccgatcagctccatgtcggcgaacatcgcgcccgggcgcaggccgcggtcgtcgagtgcagcgtccaggcccgcctcgcgcagctcctgcagcaggttggcagcggcgtcggccacggccgcatcgcccttcgggttgatcacacacaccaccacctgccacggcgccatcgcgtccggccagatgatgccggcatcgtcatggttctgttcgatcgcggcagccaccacacgcgagatgccgatgccgtagcaccccatcgccatcaccgcggccttgccgttctcgtccagcacggtggcatccagcgcttcggcgtacttgcggccgagctggaacacatggccgacttcgatgccacgtgcgatcttcagttcaccgccgtccacggcacggtcgccggcccgcacgttgcggatgtcggccacttccggttccggcaggtcgcggccccagttgacgccggccaggtggaaaccggcttcgttggcgccaacgacgaagtcggccatcgccgccacttcgcgatcggcgaccacgcggatggccttggccggggcgaccgggccaaggaagcccggcacgctgcccaggtgctcggcgatttccgcctcgctggcgaagcgctgctcgtccaggccggcgaccttggccagcttgatctcgttgacctcatggtcgccacgcaccagcgccagcacgaactgctgtgccttgccttcgccggcgatcagcgccaccgacttcaccgtgcgctgcaggtcgatgccgagcagcgccgcgacgtcctcgcaggtcttctgggtgggggtatccaccttgcgcatcgtttcggtggcggccgcacgcggcgccgggtcggcggcaatcgccgcttccatgttggctgcgtagtccgagccggtggagaacaccagcgcgtcctcgccggaatcggcgatgacgtggaattcctgcgacgcatcaccgccgatggcaccggagtccgcctgcaccatgcggaaatccaggccgaggcgggtgaagatgcggctgtaggccgacttcatgttctcgtattcgcgcaccaggcactcgtcgtgcaggtggaacgaataggcgtccttcatcaggaactcgcgcgagcgcatcacgccgaagcgcgggcggatctcgtcgcggaacttggtctgcacctggtagaagttcaccggcagctgcttgtagctggacagctcgctgcgcgcgaagtcgcaggcggcttcttcggcggtcgggctgtagcagaacacctggtccttgcggtccttgatcttcagcagctgcgggccgaacttctgccagcggccggtctgctcccacagttccttcggctggatggtcgggatctggaattccacggcaccggcccggtccatttcctcgcgcacgatgcgctcgaccttgcgcagcacgcgcaggcccagcggcgaccaggtgtacaggcccgatgccagcttgcggatcatgcccgcgcgcagcatcagccgatggctggtcagctcggcgtcgctgggggtttccttggtggtgtgcaggtggaactgggagaggcgcatcgtcggcttcggataacggcagagacctctattctgccagcccggccggggggaggggtatcggcagggctgcgccctgcacctgcgggtagtgccggccgctggccggcaacagcaacagcaaaaacgggtttcctgggagatggcggggtgggtccggcggcaggggacgccgtaaacccatccctgggggcttggtcgcgccttgctcgtgtgcgctgtcctgcgcacacggcaagaccggtgttgagcgtcctgcccaacccgcccgaggcatgcctcgggcccatggcgctcacacccctgccgccggacccaccccgccttcgacagtttcctgcgagctgtcggaatggctcctggggtcagatccgttttccgcaggaaaacggatctgaccccggattcaattcgagatctgacagatttcatccacgcatggcgtggatctaccaccgacaccgccccgcccaacccacagatagcccagagccggctgttgcccttgctgttgcctctgcaggtgcagggcgcagccctgccgatacccttaaccggccggtgggcagtacgccttgatggcggcctgcgccaatcccctctgcgcggtgtgctgctccggagtcaacggggtatcggccttgccatcaccatcggtgtcctgcatcacctggccaccaccgtccagcagggccaggttggcccgggccgtgctgcactgcccggggaccggcgcggccggggtctcggtgctggctgcggcctgcggggtgcgggcctgctcgcgggtctcgaacttcttgcccgccggcggggtctccgaatactgggttacgccatgggcgtccttccatttgtagacggggccggccacggcgttggcactggccaacagcagcaggcatccaaggcaggacagggcacgcatggcagactccacggaatgggcgcagaacgccgattgcagcattggcgccgaccgctggcaagtcgattaaactggattccatggacccgatcacaccgccgccgcgctcgcgcacgatttacctgctgcccaacctgttcaccaccgccggcctgttcgccggtttctacgcgatcatcgccgcggccaacggggatttcgtcaatgccagcatcgccgtgttcgtggcggcggtgatggatggcctggacgggcgcgtggcgcgcctgaccggtaccagcagcgaattcggcgtgcagtacgactcgctggccgacctggtcagcttcggcatggccccggcgctggttatgtaccactggtcgctgtcgtggctgaagttcgacgatccgctgctcggccgcgtcggctgggccgtggccttcctgtatgcggcctgcgcggcgctgcgcctggcccgcttcaatacccaggtggcggtggtcgacaagcgctggttcgtcggcctggccagcccggcagcagcgggcctgatgatgtccttcgtctgggcgttcgccgatggcaacctgggctgggacggcaaccagctgcggtacgtggcgctggcggtgacgatcatcgctgcgctgctgatggtcagccgcatccgcttctggagcttcaagggtggcgctgccaagggcacccgttcggaccgcgtgccgttcctggtgctggcactggtgccggtggcgatcgcgattgcggtcatcgacctgccgcgcgtgctgttcgcggtcggcatcctgtacgccttgtccggcccggtgatgtgggccgtgcagcgcctgcgcaagaagcccgaggccgcgtgagccaggacctgcccgtgctgtggtcaccggcccagcaggcctggctgcaggccatgggctacaccgtctatcacgatggccagctggctgccgagctggatgccgcgctgcagttgagcgtggccgaagccgaggccagcgtcgccccgccggaaccggtgcgggcccccgtgccgtcgcgcgaacagcatgccggggtggcgcccgcagcccgcccggaacggccggcaccgccgcgccgcgaaacgccggtcagtgccccggataccgtgccggcggctgagcgcccgatgcccagcggcaacgcgcgccagccggtggtccgcctgccggatcgcctgcagatcgcgctgctgcgtgcgtccggctgcaacccgaacgacccggctacgcagcggttgatggacagctggccgctggaccagctgcgccacgacccggccgccaagcgtgcgctgtggccgcagctgcgtgccctgcgcaagcggggcacgccatgagcgcggtcacccggcccggcccggtcagcctgcgtgcgttgcgcgagagcgacctcaatgcggtaatggcgatcgaactgcgcggctacccttttccctggacccgcggcatcttcatcgactgcctgcgtgccggctatcccggcctggcgatggagcgcgatggcctgctggtcggctatggcgtgctcagcatcgccgccgatgaagcgcacgtgctgaacatctgcatcgatccgctggcacagtcgcgcgggctgggccgccagctgctgcgcgcgctggtgcagctggccgccgaccgtggcgcacagcgcgtcttcctggaagtgcgtccgtccaatacgccggcgctggcgctgtatcacagcgaaggattcaacgagatcggccgccgcccgcgctactacccggctgcacagggccgcgaggatgcggtcgtgatggcgatcgagctggtcgacggcgatctgcaggaaatgccgccgctgtaacgcagacgggttgccggccagcggccggcactaccgatgcgtcgctcacgccagccgcaacgccagcacaccgccgacgatgagcaccgctgccagccagcgcgtgcgcggaacccgctcgcgcagcaggaacaccgagatcagcagcgcgaacaggatcgaggattcgcgcagcgccgagatcattgccaccggcgcctgggtcatggcccacaacgccatcgcataggaggcggtggtgccgacgccaccggccagtcccagcggccaatgctgccgcgcatagtccagtaccgcgccgccgcgcgtatacaacgcccacagcggcagcgggatgcccgacagcaggaacaaccacaacgtgtagctgagcgcgctgccggactggcgcgcaccctgcgcatcgaccagcgtgtaggtggcgatcatcgctgcggtcagcagcggcaggcgcagttggccgccacgcgcacccagtgccatgcacaggatgccggtgctcaccagcaccacgcccagccacgctgcggcgggcaatggctcaccgagcagggtgccggccagtgcgaccaggatcggcgcgctgccacgcatcagcgggtaggccaggctcatgtcgacctgctggtaacaacgcgcgaccagcccgtagtaggtcacctgcagcagcaccgacgcagccagccagggccagctgtgcgcggccgggaagggcaggaagggcagggcggcggccgacagcaacgcggcactgccggtcaccagcacggtaccgaggaacttgtccgggccgcgcttgacgatcgcattccagctggcatgcagcgccgcggcagcgaggacgagcaggaagatggaaagcggcatccgccgatgatgccatgcggggcaaatggaaacgccgggcatcgcccggcgtttccgattccgcttcggtaggtgccaaccttggttggcacgcaccagagcgcgacgttacagcttcgcgcgctgctcgcgcaggccggccagctgggtgttccagtcgaccaggcgcacgcgctcctgatcgaccaccgccggtggcaccttgtcggtgaacctggccagcttggtttcgctcttctcctgctcaccttccacgcgcttgatctccttgtccaggcgcgcgcgctcggcatcgagatcgaccaggccttccagcggcaccagcagcttcagctcgcccacgatcgcggcggccgccggcggtgcgctttcgccctcggccagccactggatgctgtccagcttcagcaggaacgacagcgaggcgctgaagcgttcgatgcgcacgcggtcctgctccaggccggcctgcaggcgcagcggcacctgcctggacggcgcgacgttcaattcgctgcgcacgcgacgcaccgcactgatcaccgccttcagccattccacgtcggcctcggcctgggcgaaatcaccggcgaattcggcggcggtcggatacgggcgcagcgacagcgtggtttcggccaggcccaggcgcggggccagctgctgccacagctgttcggtgatgaacggggtgagcgggtgcagcaggcgcagcagcgcttccagcacgtacagcagggtgtggcgggtgctttcggcatcagccgcgtcggcaccgttcagtgccggcttgctcagctccaggaaccagtcgcagaacgcgttccaggcgaactcgtacaggcactgcgccagcaggtcgaagcggtacgcggcgaaatggccctgcgcttcggcggtggtggcggccaggcgcgaaaggatccagcgctcggcatcggtgcgcggggtcggcacgccgctgaacgccgcaccttcggtgttcatcagcgcgaagcggctggcgttccacagcttgttgcagaagttcttgtagccctcggcgcggttcatgtcgaacttgatgtcgcggccgtgggtggccagcgcggcgatggtgaagcgcagcgcatcagcaccgtgggcagcaatgccgtccgggaattccttgcgggtggccttctcgatcttctccaccatcttcggctgcatcaggccgccggtgcgcttggcgaccaggtcgtcgatggtgatgccgtcgatgatgtccagcgggtcgagcacgttgcccttgctcttggacatcttctggccctggccgtcgcggatcaggccggtgaagtacacgtccttgaacgggatcttcccgaccaggttgtcggtggccatgatcatgcgcgccacccagaagaagatgatgtcgaagccggtgatcagcaccgacgacggcaggtaacggtcgaagccgcgctcggccatggcctgttcgttcggccagcccagggtggagaacggccacagctgcgaggagaaccaggtctccagcacgtcgctttcctggttcagcaccacctcgctgcccaggttgtgcttggcccgcacttcctcttcgctgcgaccgacgtagcagctgccggtggcggcatcgaaccacgccgggatgcggtggccccaccacagctggcggctgatgcaccagtcctggatgttgttcatccagtggcggtaggtgttgatccagttcggcggcacgaaggcaatgcttccgtcctcgaccaggtccaggccacgcttggccaggtcgtccatcttcacgaaccactggtcggtcaggtacggctcgatcacctggccggttcggtcgccacgcggcacctgcagcttgtgcgccttggtctcgaccaggatgcccaggtcttccagctcggccagcacggccttgcgtgcttcatagcggtccaggccccggaagcgttccggcgcgttctcgttcagcgccgccaccggggtgaacaggttgatcatcggcaggctgtggcgcacgcccacttcatagtcgttgaaatcatgtgcaggggtgaccttgaccacgccggtgccgaacgcgcggtccacgtagtcgtcggcgatcaccggcacgcgccggccggtcaacggcagcaccacgttcctgccgatcaggtgcgcgtaacgctcgtcttccgggtgcaccatcaccgcggtatcgcccagcagggtttccgggcgggtggtggcaacgaccaggtagtcgcgggtttcgcgcagggtttccacgccgtcggcatcgcgctcgacgtgctcgtagctcaggccgtcatccagcgtgtaggcgatcgaccacaggaagccgtcttcctcggcgctctccacttccaggtcggaaatggcggtcttcagcaccgggtcccagttgaccaggcgctggccgcggtagatcaggccctgctcgtaccagcgcacgaaggcctcgttgaccgccgccgatggctgcgggtccatggtgaaagtgctgcgcgaccagtcggcggaggtgccgaggcggcgcatctggcgttcgatggtgtcgccggactgctgcttccactcccagaccttgccgatgaagccttcgcggcccagcgaatcgcgggtctcgcccttgccttccagcgccaggttgcggctgaccaccatttcggtggcgatgccggcatggtcggtaccgacctgccacagcgtgtcgtagccgcgcatgcggtggtagcgcaccagcgcatccatcagggtctgctggaaggcatggcccatgtgcagggtgccggtcacgttcggcggtggcagcaggatggtgtacggctcgcccgtgccggacggcttgaagtggccggccttctcccaggcctcgtagaggtcggtctcgaaggacgtcgggtcgtagctggaggcgagttgggtcatgcgggggaaccggtaatcaaggcggaagggagatcagcgcgacccgagggcgcgacggatcttctggtcggtgtggtactggctgaccgcgtaggcggcccagatggcggcgggcagccagccgatcagggtgatctgcaggatcaggcagacgatcccggccagcggccggccgatggtgaagaaggacagccagggaagaatcagggcgatcagcaggcgcatcaaggggtcctcgccgggctcacatgtcgtgcttgttgaggtcgtaaccggcggccttgtactggcgccagcgctcgcgcagcggttcgcgcgcttccggatcggccggaaccacttccagcacacgctcgcactggcccagccagggctcatcgcgcaggttgatcaccagcgggcgtgccggcgcgtcggtgccgggtacggcgatcagcaccagggcctcttcctcgtccatgtcttcgccggcaatctggtgcgggatgtaggcatcgttgtcgaacgcccacagcagctcgtccagttcctcggcctgggcctggtcacgggccagcaccagggtgaacagcccggcgtcgttggccttgcgcgccagttcgcagaccaggcgcaacggctcggtcaggaagcggggcttggcgatcaggtagaagtcggcgcggggcatggcagggtccgggtcaggcaagggcccggcagtgccgggcgaggccccggccggcgtctgccggccagggtcgggtacggcatcaggcgcgggtgacctggtccagcagccactggctcagcaggccgaccgggcggccggtggccatgccacgcttgccttcatcgctggcgacgccggcgatgtccaggtgggcccagcgctggccttcggtgaagcgcgacaggaagcagccggcggtgatcgcgccggcccagcggccgccgatgttgtagacgtcggcgaaggtcgaatccagcatcggctggtactcgtcccacagcggcaggcgccaggcgcggtcgaacacgtgctcgccggcggccagcagctcgttggccaggtcgtcgtgcttgctcatcaggccggcggtctggtggcccagggcgaccatgcaggcaccggtcagggtggcgacgtcgaccagcgcggccggctcgaagcgctgtgcgtaggtcagcgcgtcgcacaggatcaggcggccttcggcgtcggtgttgccgacttcgatggtcttgcccgacatcgaggtgatcacgtcggaaggacggtaggcgttgccgtcgatggcgttttccaccgccggcaccaccaccaccaggttcagcggcagcttggccttgaccgccgcgacgaaggtgccgatgacgttggcgccgccgcacatgtcgtacttcatctcttcgatgccgccctgggtcttcaggttgacgccaccggtatcgaaggtgatgcccttgccgaccagcacgtagggcttggcgtcgccgccattgttccacttcagcacgaccaggagcgggcggttggccgaaccgcgggccacggccagcagcgagcccatgcccagcgcttccatctggtgctcgtcgaggatctcggcttcggcaccctcgtgctcgccggcgaacttcacgcccacgtcggccagataggccggggtgcaatagttcggcggcaggttgcccagctcgcgggcgaactcgacaccggcggcgatggcctggccctgggccagggcctgggcgtcgtcaccggccacggccagctgggccaggccggcatcgtcggccttcttcttgcccagggtggcggtgtagcggtaggcggcgtgatcggcggcgatcactgcctggcggatcgcccaggccgcgtcgcggtccttgatggccacttcggacagggtgaacagcgcgctgcggacggcgccggccttcagcgcgcgcaccgcgtcgcccacggccttcaggtactgcggcacgccgaagcgggcggcgtcgccgaggccgaccaccagcacgcgcggcgcggtcacgcccggcaggtcgtgcagcagggtggtcgcgccggtcttgccggacaggtcgccacgctgggccagggcggccaggcggccaccgctggcggcgtccagggcctgcgcggccggggtcagggtatggtcggcatacgcgccgaccaccaggcaatcaacggtggcggcggccggagcaacgtggttcagggtgaattcgagggccattgagcagattccattggcgagtccgtacaatcgcaggccgtttacgcccagacagtagactgggcggcaccgcgaacgaaccccagagtttaaaccaccgtcccatgctgaagctcgaccgatacctgctgggcgatttcgtccagagtttcctggctaccctgatcgtcctgctggtggtcagcgtgggcggcgtgctggtggacatcctcggcaacatcgccgacggacgcctgccggccaagctgctgttctcccagctgggcctgcagttcatcgcctacctgccgctgatcctgccgctggcgctgatgctgggcctgctgctggccgtggcccggctctaccgcgactcggagatggcggtcatcaccgccattggcgtggggcccaagcggctgctgcggccactgctgatgctggtggtgccggtggtgctgctggtcggcgcctgctcgctgtggctgggcccgtgggccggccggatggccgagcagatgatcatcgaggccaaccgcagcgtgctgatggccggcctggagccgggccgcttcactccgctgcccaatggcggcgtggtttacctgtcctcgatctcgcccgatggcacccagctgggcaaggtgttcctgcagcgccagaaggatgaccgcctggaagtggtgtccgccaatggtggccgcatgttcttcgagggcacccgccagcgcttcctggagctggatgacggccaccaggtggaaggcccggtggccggcgcgctggattaccggctggcgacctttgcccgcaacgacgtggccctgcccgacggtgcacagacccgcaccgaggacgacccggaactgatgccgaccctgcagctgatcggcgatgagcgcccgcaggcgcaggcgcaggcgcagctgcaccgccgcctggcaccgccgctgatcgcgctggccttcgccctgctgaccgtgccgctgggccgcagctcgccgcgccagcagcgctacggccgcatgatgctggccctgatggcctacatggtgggcaccaacctgatgttcatcggcagtggctggatcgccaacggcaagattccggccgcgctcggcctgtggtggttgaccgtgccgctgctggcgctggcaatctggatgtatgcacgtgatggccgcctgggccgctcgaagggagcccgcgcatgaggctgcgcccgatgcgtttcgatctgtacctgggccagtcggtgttcaccacggtgctgctgacctgggcggtgctggtcggcctggacgtggtgatggcgttctccggcgagttcaaggacatcggcaagaacggctacaccctgggccatgccgccgcctgggtgctgtacacggtgccgcgccgcgcctacacgatgttcccgaccgccgcggtgatcggcgcgctgatgggtctgggccagctggccgcgacctcggagctgaccgccctgcgtgcgctgggcctgtcgcgcaagcgcctgagcgtgtcggtggcgatcgcgctgtcgctgctgaccgcagtgatggtgctcagcgccgagacgctgggcccgtgggggcaggaccgtgccgatgcattgaaggccagtgccaagtgggggcgggacatctccaccacccgctactccggcctatgggcacgcgaaggcgacaccttcctcaacgcccagagcggcgaggaacagctggtgggcgacaagggcacgcggctgatcctgcgtgacgtgcggctgtaccggatcgccgaagacggcaatatcgcctcgctgacccatgccgccaccgccgagcacgacaaggacggttgggtgctgaccggggtgcgtcgcgacaccttcggcgagcgctcggccacccgtcaggaagtggcgcgtgagccgtggaactcgaagctggatccggccgcgctggccaccggcatcgccaagccgcgaaacctcagcgtggccgagctgagcaccagcattgcctaccgccagcgcaacgggctggatgcgcgcgatttcgaggatgtgtactggagccgctggttctacccggtgaacgtgctggcgctgtgcctggccgcggtgccgttcgcgttcgggtcgctgcgtagcggcggcatgggcaagcgcctgttcctgggcatcctgtttgcactgggcttctggctgctgcagctgttcttcggccgcatggccggtgcgctgaagttcgattaccgcattgcctatgcgctgccgccgatcgtcatgctggccgtgtccggactgttgttccggcgcaagtcgggctgattctggtagcgcggggccatgcccggcgctaccggggcaatccaccgcttcggcatccgtgccacgaccaccagcatcccggcccagcgtgctggattctgtagagccgagcccatgctcggctgctttttgcgcaccgcctgccagccgagcatgggctcggctctacagatcgtgcatcaccgcttgggcatgcgcaccaggcgggtgccgctggcgcggtcgtgccaggtcaggcgttggcggtcgacccaggcccaccagaatcccaggccgcccagcagcagcgacagcgtccccaccgcgaagcgcagccacagctggccgcgccgcaacggcgtgccatcgcgcgactgcagtttcagccgccacggccgcatgcccagcgtctgcccgccgcggcgccagctggccgtggcataccaccccgtgatcgcccagcacaccgcccacagcagccactgccagatactgaacggtgcgatgttctcgcgctgcgcgtggccgctgaaggtgtaggcgagggtgaacagcgtgccggccagcatccacagcgccagcaccggcagcgcgtcgtaggccatcgccagcatgcgccagggcagcagcgcgcgcggacggagcgtttcggtagcggccgcaggggccgtgtcggtggcagggcgggacatgcgccgagcatacgcaaagctggccgtgcccgcagtggccctcgtatcctgcatgcatggcccttgtttccacccccgccgaacgccgccagctggtccagcaactgcccgagctgcgcgccgacgacagtgtgcgcatccagcgcttcctcgatgcgatctgggccgagaacggcctggcccgcgccaccctggacagctaccggcgcgacctggaagggctggcgcgctggatggatggacgcgacggtggcctggccggcatcgaacgtcccgggctgttcgactacctggcctggcgcacccgccacggctggtcgccgcgcagcaacgcgcgcctgctgtcggtgctgcgggcgttcttcgccgatggcgtgcgccgtggcgaacgcagcgaagaccccagtgcgctgctcgaccccccgaagctgccgcggctgttgcccaaggcgctggccgagagccagatcgatgcgctgctggcggcaccggacatcgacagcccgctgggcctgcgcgaccgcgccatgctggaactgatgtatgccgccggcctgcgcgtgagcgagctggtgctgctgccggccacggcggtcaacctgcgccagggcgtgttgcgggtcaccggcaagggcagcaaggagcggctggtgccgctgggcgaggaatcgcagcactggctggagcgttacctgcagcagtcgcgcccgctgctggtcggcaagggcaaggtgcatgccctggcggatggtcagaccccgttgttcatcgagccgacgctgcatgcgctgacccggcaggcgttctggcacctggtcaagcgccatgcacaggtggccggcatcgacccggcgcggatcagcccgcatggcctgcgccacagcttcgccacccatctgctcaaccgcggtgccgacctgcgcgcgttgcagatgctgctcggccacagttccttgtcgaccacccagatctacaccctggtagcgcgcgagcatctgcagaagctgcatgcccgccaccatccgcgcggctgagcgccgggctgaatcgctgcccggggccgtgccgggcgtcgcggcccggtaccggcggctgtgtcagaatccggagtcttcttctgttgcggatcgctccatgctccgatttgccatcgccgccgtgttcggtgcgctcagcctgaccgcctgcgcccagccggctccgccggccgccaaggcgcctgctgccgctgcggccaaggccagcccggccgccaacgcgccggccgaccaggcggtacgtgccgcgttgaccgcgctcaatccgggtttccaggtcgattacatcggtgccgcgccgttccccggcttccgcgaggtcgtcgtttccggccagctgctgtacgtgtccgatgacggccgctacctgttccagtcgcagccttacgacacccgcgccaagggcccggccaacagcgagggcctgcttggttaccgccgcggcctgctggccaaggccaaccacggcgatcgcatcgtgtttgccgctccgaacgccaagtacaccatcagcgtgttcaccgacatcgagtgtggttactgccgcaagctgcaccaggacatcgccgaactcaaccgcaacggcatcaccgtcgagtacctggcgtttccgcgcatgggcctgggcagcaaggactacaccgacatgatctcggtctggtgtgcagcggatcgtcgccaggccctgaccaacgccaagcgcggtggcagcgtgccggccaggaactgcaccaacccggtggcgatgcagtacgcgctgggccagcaactgggcgtgaatggaacgccggcgatcttcgcgccggatggcacccagctgggcggctacctgccgccggcgcagctgcgtgccgcgctggagaagctgtcggccaagcgctgatcgccgctggtctttttctgtagagccgagcccatgctcggccgtggaaacagcagccgagcatgggctcggctctacaggcaggaagccggggatgcgtgtcgcgtccccggccttttgcttacttcaggccatcactgaccgccttggtcagcgtgccctgcgcatcgtcaccgctgaactcccagacgaacgcgccgcccaggccctgggtcttcacgtaacccatcttgcgggtgatgttggccggggtgtcgaagctccacagcgtgctgccgttgtagatccaggtggcaccggcggtgttgtcggtgtagcccggccacgccaggttcttcagcaccttccagtcctcgatgccggcttcatacgtacccggggcggcgccggtcgcggtctggtacaggccgttgttggcgttggccacacccgtccagccacgcccgtagtagccaatgcccaggttgagcttggcggcgggcacgccacggctgatgaaggcctcgatggcgtcgttgctgttgtacagcttctggtcgccggtggacggatcattcggcgaatcgaacagcgccgactggtgattggtcttcgcatcccacgcgccgtggaagtcgtaggtcatcacgttgatgtagtccaggtacgggtggtatgcggccggatcggtgacacggatcttgtcgatgccggcacccaccgccaccgtcagcaacaggcccggccgcaccgcatcgagttggcggcggaactcggccatcagcgcggtgaagttggcgttgtcttccggcttgccgcactcgatgccacaggccaccgggtattcccagtcgatgtcgatgccgtcgaacacgcccagcgcggcaccggcaccgccggcaccgtcggtcaccggcaggttgcccttgatgtaggcgtcgatgcacgaggcgacgaaggcctggcggttttccgggcgcgctgcgctggagaagccgcgcgaccaggtccagccacccagcgagatcagcaccttcatgcccgggtatttggccttgagctgcttgagctggttccagttgccgcgcagcggctggtcccaggtatcggcactgccgctgacgctctcggcggcactgaaggccttggtgtagtcggcgaaggcatcgccaccggcaccgctgttcggatccgacggctgggtgatgccgacttcgcatcggttgttgcgcacgttgccgaacgcgtagttgatgtgggtcaggcgtgcggccgagccgctgctgtcgatgttcttgacccgatagttgcggccgtagatgccccactgggtgaagtaaccgatgacccgcttgccggtagtgccgccgtcaccggccagcgtggtggcgctgatttcggtgccctgcgccgacgcgttgccggcgttgtcgcgcgcccgcacgcggtaacggtaggtggtcgatgcggtcagcccgccatccacatagctggcgctggacggcgaaccgaccaggctgccgttgcggtacacgtcatagccagccaggccactgccaccggtgttgtcggtggacgggctccagctgagcgcgatgctgttggcggtacgggtgccgaccgccagcccgcccggcacgctcggtgcggtggtgtcgccaccggcggcgttgacggtgatggtgatggtcggggtgctggtggtggcgttgttgttgtcggtcgcgaccgcacgcagggtgtggctgccggcgctggcattggcccagctggccgcatacggcgcaccggtggccacgcccagcgagctgccgtcgcggaagaactcgaccttggcgacgctgccgtccgggtcactggcggtagcggtcacgttgaccgtgctgccggcgctgaaggtggcgccgttggccggcgaggtcaggctgaccaccggcggctggttgctgccgctgccatcgcaggcaccaaggttggtgtagtagggcgcaccggccggatggtccggcggcgcgttccagatgtcctggttcgcccgatagaggacgcctcctttctgcagggtatcgccggcccggtagatcctggcctggtcccactgggccacgccggcacagctggcagcctgtgccaggccgggcagggcggcggtaccggcggccagggcaagcagccaggccaggtggcggggacgacagcttcgggtcgaacgttcggcactgcgcacaatcgggtcgtacatgggtaagtctccgatcaaagggcgcgcgggccccgatggcgccgcgcgtgacgcaggtccgggcgtcgcccgggaaggcgacggagggggcggacggggtacctggggggccggggagagagtccggcgcccaggtggggacaacgttgtcatcaatcgcgtggtcaatccgtgagcaagcgcatggttccgggattcgggcggagagcggcgctgcgcgcggtcggcggccatcggcggagccccctcgtggctgggggctttccgcgaaaagcagatttctggggttggccgggtgggtgggctgcgcaggggacgccgtgaatacgtccctgtaggctcgggcgcgccatccatggcgcttacgcccctgcgcaacccacccgcccggccacggacaggttcctgcgcggccagccacgaaagacagaacaaaaaatcaaaagcaaaagccggtcgcttcgctcttcaatgcctgacttctgagatttccctggttgccggccagcggccggcactaccgcagagcatgcacgcatggcgtggatttaccgcagatcgcggaaatctgtcgaaggcggggtgggtccggtggcgggggtgtccgcggcatggatgccgcggccaagcccccagggacgggtttacggcgtcccccgccaccggccccccccccgccaccccacgggaaccccgcttttgctttggccgttgctgttgccgttgccctggcctcggcgggtgccgggcgccgcccggccagagcccttcccccgcttccggtacaatgtcgggcccgtttcccaactacggttccccggacatgatggtcctcgagggcgcgcccgccctgtcgccgttccgccgcgaacgtcttgaatcccgcctgcagtccatcgctccctccctgcgcatcagcggtgcctggcacgtctatttcgtgcagcccgaaggcagcgccgcccccgacctgaccaccctgtgccgcatcctcgaagcggcgccgcaggccgaagccgtggccgacggcgcggtcagccgcatcgtggtgccgcgcctaggcacgctgtcgccgtggtcgagcaaggccaccgaactggtccgcggtgccggccagccggtcagccgggtcgagcgtggcctgcgcatcgacgtgcagggctggccggccgatgccgccgcccagcaggcgctggtcaaggcgctgcacgacccgatgacgcagtcggtgctggagaccgtggaacagggccaggcgctgttctcggcaccggcccggggtgaactggagcgcgtgccggtggaccagctggaggccgccaaccagcgcctcggcctggccatggcccaggacgagatcgactacctgcgcgagcgtttcactgcgctgggccggtcgccgtcggacgtggaactgatgatgttcgcgcaggccaattccgagcactgccgccacaagatcttcaacgccagctggaccatcgacggccaggagcaggaccgctcgctgttccggatgatcaagaacacccaccagcagactccgcagcacacgctcagcgcgtacagcgacaatgccgcggtgatcgaaggccatccggcctcgcgctatcgccccgatccggccagtggcgaataccgccgcgagccgcaggtgcccagcgcgttccagatcaaggtggaaacgcacaaccatccgaccgcgatcgcgccgttcccgggtgcctcgaccggtgccggtggcgagatccgcgacgagggcgcgaccggccgtggcggcaagccgaaggcgggcctgaccggcttctcggtctcgcacctgcgcatccccgagctgccgcagccgtgggaagcgccgcgcgcgctgaacccgcgcatggcgccggcgctggaaatcatgaccgacggcccgctcggcggcgccgcgttcaacaacgaattcggccgcccgaacctgctcggctacttccgcagcttcgagctgcccgaaggcgccgatctggtgcgtgcgtacgacaagccgatcatgctggccggcggcctcggcgcgattgatcgcgtgcaggtcgacaagatcccgctgcaggccggtgatgcggtcatcgtgctcggcgggccggcgatgctgatcggcctgggcggtggcgccgccagttcggtggcctccggcgagagcgccgaggacctggactttgccagcgtgcagcgcgacaacccggaaatggagcgccgctgccaggaggtcatcgaccgctgcgtggcgatgggcgccaacaacccgatcaagttcttccacgacgtcggtgccggtggcctgtccaatgccatccccgaactgctgcacgactccaaggtcggcggtgccatcgacctgggcaaggtgcccaccgatgatccgtcgctgtcgccgatgcagctgtggtgcaacgagtcgcaggagcgctacgtgctgggcgtggcccgggagcgcctggccgagttcgccgcgctgtgcgcccgcgagcgctgcccgttcgctgccgttggcgtggccaccgccgaggagcacctggtggtggcctacggtgccgtgccgggccacaccccggccgatgcgccgatcgacctgccgatggacgtgctgttcggcaagccgccgaagatgcaccgcgacaccgcgcacccgccggcgccgcgctggccggcgctgaagaccggcggcctggacctgcaggaagccggcctgcgcgtactcgcgcacccgaccgtcgcctcgaagaacttcctggtcaccatcggtgaccgcagcgtcggtggcctgaccgcgcgtgagcagatggtcggcccgtggcagctgccggtggccgacgtggcgatcaccctggccgacttcgatggcgtggccggcgaagcgatgtcgatcggcgagcgcaccccgctggccctgctcgacgccgctgcgtcggcacgcatggcggtgggcgaagcgctgaccaacctgtgtgcggccccggtcgatgcgctggatgaaatcaagctgtcggcgaactggatggccgcggccggccatccgggcgaagacgcactgctgtacgacgcggtgaaggcggtgggcatggaactgtgcccgcagctggacatcagcatcccggtgggcaaggactcgctgtcgatgcaggcgcagtggcacgaccagggcgaagcacacaagagcgtgtcgccggtgtcgctggtgatctcggcgttcgcgccggtcgccgacgtgcgcaagcagctgaccccgctgctcgaccgcgacgtggacagcgagctgtggctgatcggcctgggtgccggcaagcagcgcctgggcggttcgatcctggcccaggtgcacgccgaccatggcgatctgccggccttcgccggtgccgctccggacctggacgatccgcagcgcctgcgtggcttcttcgagctgatccgcgatgcgcgccagtccggcctgctgctggcctaccacgaccgtagcgacggtggtgccttcgccgcgctgtgcgaaatggccttcacttcgcgccttggcctggacatcacgctcgatgcctggggcgatgatccgttccgcagcctgttcaacgaagaactgggtgcggtggtgcagatcgcgcgcgaagaccgcgctgcgttcgccgacctggtcgaacgccacgcactgaccgaatgcgcacagcgcatcgccaagccgaccaccgcgccggtggtgcgcgtgtcgctgggtggcgagaacctggccgaatggcgttgggacgcactgttcgacgcctggtggtcggtcacccacgcgatgcagaagcgccgcgacaacccggccaacgccgatgccgagcgcgaggtcgcccgtgccttcaacgcaccgggcctgaagcccaagctcagcttcgacctgaacgaggatgtggcggcaccgttcatcagcaccggtgcgcgtccgcgcgtggcggtgctgcgcgagcagggcgtcaacggccagatcgaaatggccaacgccttcgaacgtgccggcttccgcgccttcgacgtgcacatgagcgacctgatcgaaggccgcgtggcgctgcaggatttcaccggcctggtcgcctgcggcggcttcagctacggcgatgtgctcggtgccggccgtggctgggccacctcgatcctggagcgcagtgcgctgcgtgatgccttcgccgcgttcttcgcgcgcgaagacagcttcgcgctgggcgtgtgcaacggctgccagatgatgagccagctcaagaacatcatccccggtgccggacactggccgcagttccgccgcaatgccagcgagcagttcgaagcccgcaccgcgctgctggaagtggtggaatcgccgtcgatcctgctgcgtggcatggccggctcgcgcctgccggtagcggtggcgcacggcgaaggccaggccgtgttcgacaacgccgtcgaccaggctgccgcccgcgtctcgctgcgctacatcgatggccatggcaacgtcgccagccagtacccgctgaacccgaacggttcgccggacggcatcaccggcctgaccagcaccgacggccgcgtcaccatcatgatgccgcacccggagcgcaccccgcgcgcgctcaacctgagctgggcaccggctgaatggcagggtgattcgccgtggatgcgcatgttccgcaacgcgcgggtgtggtgcggctgatcgcatcgttccgcgcaggccgcaatgccaccgcgtatggaaaaacccgccgctttgtcggcgggtttttctttgtgtgcgtgaaattgctgatctggccgctagttacatccgtttttcatgcgccagcagttcgtcacgtatgtctaacaaaatgcctttataaacacgtgaaatagtgaactgcttcacggcaataggatttgtcgtgtcaaagtcttgacgatctgcaaagttgccgttaacacttgaaccccgtttcagaatcattcatttcgcagtaaccggttggcgcacgcgctcggttttctgtcgctgcgcgccgttcggcaataccccgcagtaaatcacgcgaataaacgcccccaggggacgttgggccggaaagcccagcggtggcgttgctttgcccaaaaccagtccaatcaggagccgtaccgatgaatcggatttatcgcaaggtctggaacaaagcactgggtcagttggtggtggcctcggaactggcctcctccgacagcagcagtggcggggtcgtcgaccagcgccgcgatgcgacacaggccacgcccgcactgctggcggtggcactgggcctggtattggggttgggcatgagcggcagcgcgacggcacagtcggtgcagatcggcggcagcgccacctgcgttgcattcagcggcaagctgctggaaaagtgcctgatcgaaggctcggccacggccaagggcagcaacgcggtggcgatcggcagcaacagcaatgccagcgccgccaacagcgtggcgctgggcgctggctccaaggccacgcgggccaataccgtgtccatcggcgatgccggcaaggagcggcagatcaccaacgtggctgctggcacgcagggcaccgatgcggtgaacaaggcgcagctggacgcgcaggcgcgcgccacgcaggccgcgctggctgatgtcgccgccgatggaaaccgctatttcaaggccgacggcgcaggcgatgacagcgacgcggcgaagatcgaggggcagggcgcagtcgcggccggcgccggtgcacaggcgctggccaacgccaccaccgccatcggaacccaggccattgccgccggtctcggcgccagtgccttcggccagggcgccctggccatcggcgatgccagcgtggtggtcgggcagagcgcggccgcgttcgggcttggcgatacagccgtcggcgccagcgcgtacgcagccagcgagaacggcgcggccaccgcactcggtgcgttgtccgaagccactgccgatggcgcgacggccgtcggcggtggtgccgtggcgatggcccgggcagcaccgcactgggccgcggcgccactgccgccaatgaagcatcgatcgcggtgggggcgttcagcactgccgtgggtgagtacagcaccgcgctggggtccaactcggcggcggtcgccaccggcagcgtggcgctgggcgccggctcgctggccgaccgtgtcgacaccgtgtcggtcggcgccgccgaatacggcctgacccggcagatcaccagcgtcgcggcgggcaccgaagacaccgacgcggtcaacgtcggccagttgaagggcgtcgccgccgtggccgatgccaccgccaagcgtttccaggccacgggcagcagcaacagtgatgcgggtgcattggccgagggcgacgaggcgctggcggctggcgaggcggccaacgccatcggcaacggcaccaccgccgtgggcgcgggcgccaatgccgtcgcgcagaacgccaccgccgttggcaacaacgcgctggcctcgggccagaacagtgccgcgttcggcaacaacgcgcaggccaacggcccaggcagtgtcgccgtcggtggtgctgcggtggatgccgatggcaatccgctgatcaccagtggcggcgtgccggtggaaaccggcgccaccagtgccggtgtcgggggtactgcgacgggtgcgagtgccgaggccggtggtttcgccgcgtcggcctatggcgttggcgcatatgccgccggcgcgcagtcgtccgcgttcggtgcggttgccaatgccatcggtgattactccaccgcgctgggtacgcagagcaatgccaccggcaccagcagcgtggccatcggcggcccggccgatctgattccaggcctgggcttcttcgtgcagacccaggccagcggcgaagcgtcgaccgccgtcggcgccggcgccatcgccagcggtgatcgcgcggtggccaacggcagcctgaccgaagcgtccggcgccgaagcgactgcggtcggctacttcgcctacgcaccgggcgagaacgccagcgcgctcggcgcgcagacctgggccagcggcgcgcagagcaccgccgtgggctactacgccaccgcacgcggtgccaacagcgttgcgctcggcgccaactccgaagcggtgcgtgccaacagcgtagccgtgggcagtgccggcaacgaacggcagatcaccagcgtcgccgcgggcagtgaagccaccgatgcagtgaacaaggcgcagctcgacgcggtggccagcaccgccgacagcacagcgcgcttcttccaggcccagccggaagcaggcagcgatgcgggtgcattggccgagggcgaaggtgcggttgcggcgggttcgtcgagcaatgcgatcggcgccggcgcggttgcacagggcgcagcagcctcggccatcggtgacgacgccgtggcggtgggtcgcaacagcaacgccaccggcaatggcggtgttgccatcggtggcctcggccaggcctacgacgagtacaaccagccgatcatcggtgccgacggtacggcacagcaggtcggcaccactgccgtcgccgacgccacagcggtcggcagtggtgcgcaggcgaccggtgctgccagcagtgcgttcggcaacgccgccagggccagcggagacaacagcttcgcggccggcggcaagtcgcgtgcgaccggcagctacgcggttgcggttggcgacagcgccttcgccagcagtgacgacagcaccgccgtcggtggctacagctgggctaccgcaagcggggcgagtgcgttcggttccggcgcctgggcaacggccaccaatgcctcggcatttggcaacgcggcctgggccagtggcagtggtgcgacctccatcggttacaacagctgggccaacggcaccagctccaccgccgtcggtcgcggcgcattcggttatggcgacaacagcgtggcgctgggcttccaggcgctgggcaacagcctcaacagcatcgccatcggcaccaacacggtggccggtggtgaaagcgcgatcgcactcggtgccggcagcaacgccagcgccagcaacgccgtcgcactgggcgccggctcggtcgccaaccgcgcccgcagcgtttcggtcggcagcaccggcaacgaacgccaggtgaccaacgtcgccgccggtacccaggccaccgacgcggtgaacaaggcgcagctggatgccgtggcgggcgcggcagccaccaccagccgcttcttccaggccagcggcaacggcggtgatgtggccggtgcactggtggacggtgacaacgcgctggccgccggtgatgcggccaacgccatcggcaacggggccaccgcactcggcagtggcgccaacgcgctggccagcaatgcgcaggcactgggcgtcaacgccctggccagcgccgccaacgccagcgcggtcggtgcaaatgcacaggcgaccgctgaatacgcaaccgcgcagggtgcggaaagcgaggccagtggcgagcagagtgcggcgttcggtgcggccagcatcgccagcggtgctggcagcaccgcgaccggcgtgctgtccgaagcctccggcgaggaggcggtggcagtggggtacttcagcaatgccagtggcagcggcgccaccgcggtcggcagcgagagtgtcgccagtggcaccgcgtcggcagcgttcggcatcggtgccgaggcgaccggcggctacagcaccgccatcggtggctatgcacaggcctcggccttcaatgccacggccttcggcaacttcgccaatgcctccggctccaacagcgtggcgctgggcggtgattcggaagcctccggtgcctacagcaccgccactggccagggcagcctggccaccggcaccaacagcgtcgccgtcggcggatcgctgttcggcgtgctggccaccgaagcatcgggcaactactccaccgccgtcggtggcggcgcctggtccggtggcatcaacagcaccgcgctgggcaacgccgccgaatcgcgcgctgccaacagcgtggcgctgggtgccgattcgatcgccgaccgcgacaacaccgtgtcggtcggcggcggtggcaacacccgccagatcaccaacgtggctgatggcacgcagggcaatgatgcggtcaacaagagccagctcgacgccgtagccgccgcagcggaaaagaccagcaggcagttccaggccagcggcaacgccgatggcgaaacaggggcactggtcgagggcgacaacgcgctggcggccggcgatgcggccaacgccatcggcaacggggccaccgcgctgggcagcggtgccaacgcgctggcggccaacgccacggccgtgggcatcgatgcattggccaccggcaacaatgcggcggcgctgggcagcacagcgcaggccagcggtgaagacagccttgcgctcggcaccggtgccagcgccagcgagctcggcgccagcgcggtcggtgcgcgtgcacaggccagcggtgcgtacagcacggcaaccggcaccgaatccaacgccagcggcacgcaggccctggccagcggcttccgtagtgccgcctctgccgatggcaccactgccgtcggtggctatgccgaggccagtggacgcctcggcaccgcattgggctacggctcggcggccagtggtgccaacacgaccgccgtcggcttcggtgctgctgcagccggtaccggtgccgtggcggtgggtcagtccagcgaggccagcggcgaggagagcgtggccatcggtggcagcaccttcttcggcctgatcccgtcgcgtgccagtggcaccggtgcggcggcgttcggtgccggcgcatgggcgaccgaagactacgccacggcaatcggctggaactcgtgggccgccggcagcaatgccacggccctgggcgccaacgccaccgccaacggcagcaacagtgtcgccctcggtgccggctccaaggccgaccgtgacaacaccgtggccgtcggcaaggccggtggcgaacgccaggtgacccacgtggcagccggtaccgaagccaccgacgcggtgaacaagggccagctggatgccgttgccagcgtcgccgacaggaccagccgccagttccaggccagcggcaacgccgatggcgaggccggtgccctggtggacggtgacaacgccttggccgccggcaacgcgtccaacgccatcggcagcggtgccaccgcgctgggcagtggcgccaacgcgatggccgccaacgccacggcggtaggcgccgacgccctggcgaccggcagcaacgcggcggcactgggtaccaacgcacaggccagtggtgtcgacagcgtggccgtaggcagcgctgccagcgccagtgaactcggcgccagcgctaccggcgccggcgcccaggccaagggcgcctacagcaccgccagcggcgcgcaggccacggccagcggcacgcagtcgcaggccagcggtttccgcgccactgcctcggccgatggcgcctcggcgctgggcagctacgccgaagccagtggtcgactgggtactgcggtgggttacggcagcaaggccaccggtgcgaacgctaccgcggtgggtgtaagtgccaacgcttcggcggccggcagcatcgcactgggcgcaggctcggtggctgatcgtgccaacaccgtgtcggtcggcagtgccagcagtgatcgacagatcacccgtgtcgccgccggtaccgagcgcaccgatgcagtcaatcgtggccagctcgatgcggtcgcggcgaccgccgatggcaccgcacgctacgtcaaggccagcggcgcgggtaccgccagtgccagcggcagcgatgccgcagcgatcggttcggccgccagtgccagcggcgcacgcagcaatgcgctgggtgccaatgcgatggccatcggcaacggtgcgcttgcactgggcaacagtgccggcgcgtccggtgcgaactcggtggcactgggtgcgggatcgcgtgcgctcgatgccaacgtggtgtcggtcggtggtggcaacggcaccgatggcccggccgcgcgccgcatcgtcaatgtggccgacggccgcatcgccgccggcagcagcgacgcggtcaccggctcgcagctcaacgtcaccaaccagcgcgtgggcgccgtggaaacccgtgtcggtgatttcgactcgcgcatcgccacggtcgagaccacggcggccagcgccgtcggctatgacgacgccagccgtgaccgcctgaccctgtccggcttccagggcaccaccatcgacaacgtcggcgcgggcaacatcgccgccggcagccgccaggcgatcaatggcgggcagctgttccagtcgctcagtgatgccgccagcttcctcggcggtggtgccagcgtcggcatgcagggcgtgttcgtggcaccgaactacgtgatccagggcgccacctacagcaatgtcggcgatgcgctgggcgcgctggaccgcaaggtcagtgagattgaccgtcgtactgccggtggcacgcgtgcaggcgcgtccagcctgcgcgcaatgagtgcttcgctggatgaaagcccgcaggccagcgtggccgacgcaccggcaacggccgatgccgcgccggccagtaccgcacgcgtgcagggcacgccgacggtggccgcggcgggggcgggcattccggtcggcaccccggccaccggcttcaacgccgtggccatgggcgatggcgcggtagccagcggcgcttcgtccacggccatcggccagggcgccagtgccacggcggcaaatgccgtggcgctgggccagggctcggttgccgatcgtgccaacacggtctcggtgggcagcgaaggcaacgaacgccaggtcaccaacgtcgccgcgggcaccaccgccaccgacgccgtcaacaagggccagctggatcgtggcatggcgacggcgaacagctacaccgacagtcgcgtccaggccgttgccgacagcttcgatgtgttcaagggcgagatcgacggacgcctgcgccacatggaccgccgcatcgatcgccagggcgcgatgagcgcagcgatgctcaacatggccaccagtgccgccggtatccgcacccagaaccgtgtcggcgtcggcatcggtttccagggtggcgagtcggcgttgtcgctgggttaccagcgtgcgatcagcgatcgcgccacggtcaccttcggcggcgccttcagcagtgacgatagttcggtcggtgtcggtgccggcttcggctggtaagccactccatcgcgccggcggccacccacgccggcgccgtacctgcagtgagggcctggggggaggtcacggcaatcccggctgggccggccgggagtcgtcaaggaatgatggccgcagtgttggttcgatccatgacccagaagaggaattcgacgtgatcaagaagcagaaccttcgcatcaatgtgcttgccgccgccgtgctgtcgatgacggcggtcggtgccgtccacgccgccgggttgccgacccgtgaaccggtgcgccaggccagcaccgcccagccgggtaccgagcgcatcatcgtcaagtaccgggccggcgctgctgccgccaccgaccgctcggcgaagctgtccaccgtgcagtccgcactgacccgtgccagtctctccggcggcacgtcacgcgccagcacgctcggcccgcaggtggtccgcaagctgtctaccggtgcggacctcatccgtgtgcagggccgcctggcaccggccgaactgcagcgcgtgctgaaggaactgaaggccgatccgtcggtgcagtacgccgaagccgacgtgaagctgcgccgcagcgaactgcgtgccggcaacgtgcagccggcgctggtgccgaacgatcccttctaccagcagaaccagtggcatctgcacaatgcggtcggcggcatcaacgcaccggcggcgtgggatgtctcgcagggcgagggcatcgtggtggcagtgatcgacaccggcgtcctgccgcagcatccggacctggtcggaaacctgctggaaggctacgacttcatcagcgatgcggagacctcgcggcgcccgaccaacgatcgcgtgccgggtgcgcaggactacggtgattgggtcgagaacgacaacgagtgctatgacggctcgctggccgacgacagttcctggcacggcacccacgtcgccggcaccgtggccgagcagaccaacaacggcgtcggcatggccggtgtcgcctacaaggccaaggtgctgccggtccgcgtgctgggcaagtgcggcggctacctgtccgacatcgctgatgcggtgacctgggcctccggcggtaccgtgaccggcatcccggccaacaccaatccggccgagatcatcaacatgagcctggggggcggtggttcctgcgccagcacctaccaggacgcgatcaacggcgcgatctcgcgcggtaccacggtggtggtggctgccggcaatgaagccgacaacgcgtccaagtaccagccggccagctgcgaaggcgtggtgaccgtgggtgccacccgcatcaccggtggcatcacctactactccaactatggagcccgcgtggacctgtccggtccgggcggtggcggcagtgtcgacggcaacccgggcggctacatctggcagaccggctccaatgcggccaccacgccggaatcgggcacgccgggctacatgggcatgggcggtacctcgatggcctcgccgcatgtggccgccgttgcggcactggtgcagagcgcactgatcgccaagggcaaggatccgttgaccccggccgcgatgcgtaccctgctgaaggaaacggcgcgtccgttcccggtcgccatcccggcggcgaccccgatcggtaccggcatccttgatgccaaggccgcgctggccaaggcactggaagaaccgtgcaccgaaaactgcgggccggtggccacgccgctgaccaacaaggccgcagtcggcggcctgaacggtgctgccggcagcagcaagctgtacagcttcgaagccgttgccggaaagcagctcagcgtgatcacctacggtggcaccggcaacgtctcggtctacattgcccaggggcgtgagccgagcgccagcgacaacgacggcaagtcgacccgtcccggcacgtccgaaacggtgcgggtgaacaagccggtggcgggcacctattacatcaaggtggtgggcgaagcggcatacaacggcgtgagcattctcgccacgcagtaatcacctcgtgtcgtagttgaacggccgacgcccgtcaccctgtgtgacgggcttcgtctttttacgaaaggtggccgcagggcggcggaaatcacggcttaactgctaaagtcgggccgattgacaggagagtcacgtgaacgcgctcgctgcaaccgttaccgacgacgccgaaggccgcatcctggatgcgttgctggcgcgcggccggctcaaggaaggagacctggcacgcgcgcggccattgcatgccgaggccggcggcagtctgctgggcctgctggtgcgcctgggcctggtgtctgaacgcgaccaggcacaggccagcgctgaggtgctgggcctgccgctgctggagggcaagcaggtgccggaggccccgccgcaggcgctggccgagggacttccgctgtcgctgcgcttcctgaagcagttccatgtgtgcccgctggagttggatgaacgcggggtgcggctgtggctggccgatgcccacgacgcctatccacagcaggccgtgcagttggcccttggggttccggtgacaccggtgctgggcatgcgcgcggagatcgatgacctggtcgagcgctggttcggccagggccgcagcgcgatgggcgcgatcgtggaaaccgcggatggcgagggcggtgcggtcgacgacatcgagcacctgcgcgaccttgcgtcggaagcaccggtgatccgcctggtcaacctggtgatccagcgtgcggtggagctgcgcgcttcggatatccatgtcgaaccgttcgagagccggttgaaggtccgctaccgcgtcgatggcgtgctggtggagggcgaaagcccgccggccaacctcaccgctgcggtgatcagccgcatcaagatcatggcccggctcaacatcgccgagcgccgcctgccgcaggacggccgcatcatgctgcgcgtgcagggcaaggagctggacctgcgcgtgagcacggtaccgaccgcgcatggcgaaagcgtggtgatgcgcctgctggaccgcgaaacggtggtgttcgatttccaccggctcggcttcaccgatgccttcctgccgcagttccgcaaggtgctggaacagccgcatggcatcctgctggtcaccggcccgaccggctcgggcaagaccaccacgctgtacaccgcgctgagccagctcaacaccgccgacgtcaagatcatcacggtcgaagacccggtggaataccagatcgaaggcatcaaccagatccaggccaagccgcagatcggcctcgacttcgccaatgccctgcgcagcatcgtgcgccaggatccggacatcatcatgatcggtgaaatgcgcgacctggaaaccgcgcgcatcgccatccagtcggcgctgaccggccacctggtgctgtccaccctgcataccaacaacgcagccggtggcatcacccgcctgctcgacatgggcgtggaggactacctgctcacgtccaccatcaacggcatcctggcccagcgcctggtacgccggctggagccgacccacgccgagcgctacgaagcctcgccggaagagatcgagcggttcgaactgcgccgcctgcagccggaagggccgatccacctgtaccgcccgaagccgtctgcgctggcaccgaccggctacctggggcgtaccaccatcatggaattcctggtgatgaacgatgcgctgcgccgtgcggtgatgcgccgcgatggcatgggcgagatcgagcgcatcgcccgcgaggccggcatgcgcaccatgtacgaggatggcctgtccaaggcgttgagcgggcagaccaccatcgaggaagtgctgcgcgtgaccgaggaaagctgatgcgtgcaggacgccggggctgacatgccgaactatcgctacaaggcgctcaatccgcatggcgaggtcttcgatgggcagatggaagcggccagcgaggccgagctgatcgcgcgcctgcaggaccagggccacctgccgatggagacgcagctggccgacgccggcgcgatcggcggcagcagctggcgcaacctgctgcagcagcgcccgctgcagggggccgcgctgctgcagttcacccagcagctggcgaccctgctcggtgctggccagccgctggaccgcgcgctgtcgatcctgctggggttgcccgaggacgaacgatcgcgccgcgcgatcaccgacatccgcgacgtggtgcgcggtggcgcaccgctgtccaccgcgctggagcgccagcatgggctgttctcgcgcctgtacgtgaacatggtgcgcgccggcgaagccggtggcagcctgcatgaaaccctgcaacgcctggccgactacctcgagcgcagccgcgcgctgcagggcaaggtcatcaacgcgctggtctacccggcgatcctgctggtggtggtcggtggcgcgctgttgttcctgctcggctacgtggtgccgcagttcgcgcagatgtacgaaagcctggacgtggcgctgccgtggttcaccaacgcggtactgcagctgggcctgttcgtgcgtgactggtgggtgctgctgctggtggtgcccggcgtgctggtgctgttcttcgagcgcaaggcgcggcaaccggcgttccggttggcgctggatggctggctgctgcagcggcgtggcatcggtcgcctcatcggcgagctggaaaccgcccggctggcgcgcacgctgggcacactgctgcgcaacggcgtccccttgctgggggcactgggcatcgcgcgcaacgtgctgggcaaccgcgccctggccgctgacgtcgaaacggccgccgatgaagtgaagaacggcgccggcctgtcgctggccctgtcgcgcggcaagcggttcccgcgcctggcgctgcagatgatccaggtcggcgaggaatccggcgcactcgataccatgctgctcaaggccgccgacaccttcgaacaggacagcgcccggcgcatcgaccgcatgctggcggcgatggtgccggcgatcaccctggtgctggcctcggtggtcggcgcggtgatcgtggctgtgctggtgccgctgtatgacctgaccaatgccatcggttgacgatggcactccctgcaactccgatactccgcaactgaaaggaccgtccatgattgcccgtcgccgaccgatccgcctttccttcaccgccgcgcgcaaccagtcgggcatgagcctgctggaaatcatcatcgtcatcgtgctgatcggcgcggtgctgaccctggtcgccagccgcgtgctgggcggcgccgaccgtggcaaggccaacatcgccaaggcgcaggtgcagaccgtcgcctccaagatcgacaactaccagatcgacaccggcaagctgccggccacgctcaacgacctggtgacggcgccggccggtgtcggcggctggctcggcccgtacgccaagcccgccgacctgaatgacccgtggggccacgcactggagtaccgggcgccgggcgaaggccagccgtatgagctggtcagcctgggcaaggatggcaaggctggcggcagcagcgtcgacgctgacatccgctaccagccgtaaccgcgcatgacgcacttcctgccgcgccggttgccacgcccgcgcctgcacggcaggcgcgcggctggactgtcgttgctggaaatgctgctggtgatcgcattgattgcggcgatcggcctgatcaccgccgccggcctgtcgcgcgggttcgccggcatgcagctgcgcagcgccggcaaggacatcgccagccagctgcgcatggtgcgcgcgcaggcgatcgcccgcggcgaaccgcagcgcttcgtgatcgaaccggcacggcgccgctgggagggggccaaccagcgccacggtgaggtgccggcacagctgcaggtgcagttcgaaggtgccgcacagctggccaccgcggcggggcagggcgtgatcgagttccatcccgatggtggctccagcggcggccgcatccggttgcagcgcgacggtgccgaatggcgcgtcgacgtcggctggctgaccggcgaggtccgctccggcccctggcgggcgcaatgaagcggcgcgcgcgtggcttcaccctgctggaagtgatcatcgctttcgccctgctgggcctggcgttgaccctgctgctgggcagcctgtccggtggcgcgaagcaggtacgtgacgccgagctgcgcacgcgtgcggtgctgcatgcacagtcgttgctggcccagaccggtgtcgacgcgccgctgcaggtgggcagccagcagggtgactgggaacaggggcgctatcactgggagctgcaggtccagccgtgggtggagccacgcgccggcaacgtcgtgcaggccacgtcagcgggcaccccatggctggccgagctgcagctgcgggtgcgctggggcgacagcgagcgcgaacaactgcactggcgcagcctgcgcctgttgccgcccgacctggagaacgcgcgatgaagcggcgcgccgcgggcttcaccctggtcgaagtgatgctggccaccgtgctgctggccggcggcctggcactggcctttgccagcgtgcgctcggcgatggcggtcagccagcgcggcgagcagaacgccgctgaaagcgaacgcatgcgcgcggtcgagtcgttgctgcgcaggcagctggcgggtgcactgcgcaccccgctggaggccccggaccccacccgcgaacccaacttcttccagggcgaggagcaacgcatgctgttcgccgccgacctgcccggttacctcggccgtggcggcccctacctgcacgcgctgcaggtggacggacgcggtggccaacagcgcctgctgctggacctcgtgctgctgcaggaaggcgagcgcatcgccgagaatccgccgcgcccgccggaggtgctggtggacaacctgaagtcggtgcagctgcgctatcgcggcatcgatgccagcaccgggcaggtgaccgactggctgccgcgctgggatgacacccgccgcctgccgatgctggtggaaatccagatcgtgccatcccggggcgcgccgtggccgccactggtggtggcgctgcgtgccggtggcagtggaggcacgcgatgagccgtcagcgcggggcggcattggtgctggtgctgtggctgatcgcattgatgacggcgctggtcggtgcgttcgcgctgagcgcacgggtcgagcacctgcagcagcgcgtgctggatgacgatgcacgcgggcaggaacgtgcgcgcgccggcctcgaatatgccctcctgcgcctgtcagccgatccgcaacgggcgccctggcgtgccgatggccgtacctatcgctggcagttcgacgacgccagcatcgagatcaaggtgctggacgagaacggcaagatcaacctgaacctggccgacgccgcactgctgaccgccttcctcaaggcgctgggcgaagacgatgcacaggcccggcagttggccggcgccatcatcgactggcgcgacgaggacagcctgctgcaaccgggcggtggcgccgaagcgccggactacgccgcagccggattgccctacggcccacgcaacaagcgcttcgagaccctgggcgagctgcagcgggtcctgggcatgcgcggacccctgtaccgggcgatgctgccgcacctgaccctctacagccgccaggcacggccggatccgcagttcgccagcgcgccggtgctgaccgcgctgggcctggatgcggacagtgtgatggcgcagcgcgcacagcaggagcgtgatgcagattccgctggtggcacgacaacgcttgccagcagcagcggcacctatagtatcgagtccggtgccatcgacggcagtggacgcaggtcggtggtgcaggcagtggtacgcagtggctcgggcggggttcccgggcggacttacacagtgcttcgctgggagcagggaatgacagcaagatgacggcgtggcaggacagtctgcggcaggtgcagggccggatcggcccgggcgccggccgtttcctgcgctggtggcggcagtcgctgctggcctgggtgccggtgcgctggcaatgggcattgggctggggccaggcacgcctgctgctgcagcacgagggcgaccagctgcaggtctggcgtgaagccggcgaacgccgcgaagcggtagcgcgcctgccgtggccgctgtcgccggtggagctggaccgcgtgctggagcctcgcctgcgtactctgccgcgggtatggctgctgccggcgacggacgtcctgcggcgtagcctgcgcctgcccgctgcagcggccgaccgcctgcgcgccgtggtcggtttcgagatcgaccggcagaccccgttcgaatcatcccaggtcagttatgacgtgcgtgagctcggcgcgggcggcgaaggccagctgcaggtcgaactggtggcgtggccattgcggcagctggacgcatggcgcaccagtgtgggcccatgggccgatgcgctggcgggcgtcgatgccatcgatgcgcagggcaacgtgctgcaggtgaacctgctgcctcccgcgcagcgccaactgcggccagacccgatgcgacgctggaacctgctgctggcagtggctgccgtcgtgatgctggtactggccgcggtgcagctgctcgacaaccgccaggccgccgccgatgagctgcgtgcacaggtcgagcgcagcgcgcgcagtgcgcgaggtgtggccagcgaacgcgcgcagctgcaggcgctgatcgatggcgctgcattcctggagaagcagcgcagccagcgcgccggcaccgttgaaatctggaacgaactgacccggcgcctgccggaaggtacctacctggagaagctggcgatcgagaacaacaacctgcagctgatcggcctgagccgcgaggcgtcgcagctggtgcagctgctgcaggacgcaccgcagtggcgcaaggtcaacctgaccggggtgctgcaggccgatggcgcggccagtggccgcgaccgcttcaccatgaccgccgaactgcagccgttgccggccgccgcaccaaccccggaggcggccgatgccgatgccaagcgcacgccgtgaccgctggctggcgctggcactgctgctggcagtgctgggcctggcctatctgctgctggtgcacccctggttcacccagccgctgcgcgcgatcgatgccgatgtcgccgccctgcgcgaacgcgagtcgcgcgtgcaggcgcagctgcagcagcagccgcagatcgaacagcgccttcgcactacccgcgaggcactgcagcagcggccaggcttcctgcgcgaagccactgccgaagctgccgccgctgcattgggcgcccggctgcaggatgcggtggcgatggccagcccgggcaaccgcagctgcaccatcagcaaccgcacgccgctgaccgacaaccgacgcgacgccgagttcgtgcgcgtcgccatgcaggtgcgcctgcgctgcggggtggccgaactggccaccgtgctgcacagcctggaaaccggcagcccacgcctgttcgtcgacaacctcaacctgatcgcgcagcgcttccagcaatcaccgaacgaatcggggctgggcctggacgtgtccttcgagctggccggctatctgctgccgggcgctgccgccgatggcacggttccggcgcccgctgcgacaccggcaccgtccgcgtcgccggccgaggccgcacctgcgccgcagccggcgcccccgtccgaagggcaggaggtggccgatgaagcttgagcagatcagcctgcgtaccggcttcctgctggcgctggccggttgggcggccgccgtctggctggcgaccggcttcgggctgggcagccagctgccgggtgccggcggtgatgccgacgccgcgccatcgctgccatcgctgccgccgctggcggccgagcgcatggccagcgccgacagctacagcgcgatcggtgagcgcccgttgttcgccgaagaccgcaggccgcggccttatctgctgggtggcagcgaaccggcggccagcgccgcgttgcgcctcaccggtgtgctgctgaccggcgatttcggcatggccacgttcaccaccgaacagaaccgctcgctgcgcctgcgcctcaacggcgaagccgtggatggctggcagctggtggcgctgcagccgcgccaggcgacggtgatcggccccggtggcaaccaggtcctggaactggcggtgttcaacggccagggcggtgagccgccgacggtgctgcgcggtgccaacggcgcaccgcctgcaggtgcgatcgtggtgccgccctcggcgggcgctccgccggcgccgccaccgcccgcggcaatcccatcgccgtcgcccgctggcaatgcaccagcgcctgcggcggccgctgcaacaaccccaccggccaacaacaacggtcccagtgaagcgcagatgcaggccatccgcgagcgcatccaggcccgccgccgccagctgcagcaacagcagcaacaaccgtcgccgcccccgggcgatggcaccaaccgatagagtgaatgcatgaacctgcgttttcttccctggtcctttgccctcgcgctgctggtcggctgcagtacggtgtccgcgccgcacgtgcagcgcaacggcaatctgtcgcccagcgccgacgccggccaggcggccgatgtcgctgccgatgccgcccgtgaaagccagggggcaccgcaggcggtgatccgccgcggcaccggcaccatgatcaaccgcgaggccgcgcgtgcgccggcaccggcgctgcacggtgccagtaccggcgaggcgaccttcaacttcgaaggcgaatcgctgcatgcggtggtcaaggccatccttggtgacatgcttggccagaactacgtgatcgcaccaggcgtgcagggcacggtcaccctggccacgcccaagccggtatcgccggcgcaggcactgaacctgctggagatggtgctgggctggaacaacgcgcggatggtctacagcggtgggcgctacaacatcgtcgccgccgaccaggcgctggccggcacggtcgcgccaagcacggcacccgcggccagcgcgcgcggcttcgaagtccgcgtggtcccgctgcagttcatctccgccaccgaaatgaagaaggtgctggagccgtacgcgcgccccaacgccatcgtcaacgtggacagtggccgcaacgtgatcaccctggggggtacccgcgcggaactggaaaactacctgcgcaccgtcgagatcttcgacgtcgactggttgtcgggcatgtcggtgggcgtgttcccgatccagtcgggcaaggccgagcaggtcgcggccgacctggaaaaggtgttcggcgaagagagcaagacgcccagcgccggcatgttccgtttcctgccgctggagaatgccaacgccgtgttggtgatcacgccgcaggtgcgctacctggaccagatccagcagtggctggatcgcatcgacaccgctggtggcagcgcccgcctgttctcctacgagctgcgctacatcaaggcgcgcgacttggccgagcgcctcagcgaggccttcgccagcagtggcaaccgcggcggctccagcccggcctcgctggcaccgggcgccattccgtcgcagctgggcggcgacggcgaccgtggcatggacaacagcagcagcaacctgggttcgacgctgggcggaaccagtggtagtggcagtggcagcagcaatggcagcctgaacctgccgcagcgccagcccggcaacgtcagtgtcagcctggaagtggagggcgaccgcgtcggcgtgtcggcggtggaggaaaccaacaccctgctggtgcgctcgacgccgcaggcgtggcgctcgatccgcgaggtgatcgagaaactggacgtgatgccgctgcaggtgcacatcgaggcacaggtggccgaagtcgcgctgaccggtgacctgaagtacggcgtgaactggttcttcgacaatgccgtggccggtcgcgcgctcaccggagccctggcgggcctgaccctgccgccggctgcaggtggttcgtggaacaccttcgccggcggcgtcaccggcaatgacggtgtgggctgggccttcaccggccacaacgcggccgcggtggtcagtgcactggacaaggtgaccgacctgcgcctgctgcagacgccgtcggtgttcgtccgcaacaacgccgaggccacgctcaacgtcggcgacaaggtgccgatcaacaccaccacggtgaacaccggtgtgggcaccagcacctacagctcggtgcagtacatcgacaccggcgtgatcctcaaggtgcgcccgcgcgtgacccgcgacggcaccgtgttcctggatatcgtgcaggaagtcagcagcgcctcggacgtgccggaggcctgcaacccgaccgagcgcaactgcaacccgcgcatctcgaccaagaagctgtccaccgaagcggcggtgcagagcggtgacaccatcatgctggcgggcctgatcaccgattcggccaccgacggcagcagcggcatcccggggctgagcaggattccggtggtcggtgcgttgttcgggcagaagacccgcaccagccgtcgttcggaagtgatcgtgctgctgaccccgaccatcgtccgcaacagccaggaatcgcgcaacctgaccgacgagtacagcaagcgcttccgcgcgatggagccgctgaaccagccgcgcgcgaagaagtaaggggttacggccgggcggcgcccggcacccgccgaggccggagcaacggcaacggccaaagcgaaagcaacagcaacagcaacagcgggtttactgagggagggtgggtcggcgtggggtggcaggacacgccgtaaacccgtccctgggggctcgatggcgccatccatggcgccaacggtcctgccaccccacgccgacccacctctgacagactcccgcggctgttggtaggtgtcgaccttggtcgacacggtggatccgcgccatgcgtggatgactgtctgtcagatttcgaaatcagaaaatggggtcagatccgttttcctctggaaaacggatctgaccccaggctttgccgacagatcgcagaaatctgtcgaaggcggggtgggtctggttgcgggggcgtgagccgcatggatgcggcgaccgagcttacatggacgtacttgcagcgtcccccgcaaccggacccaccccgccatcccacggatagccggcttctgctgttgcttcggcttcggctccagctccagcctccgcgggtgccgggtgcaacccggccgataccctcccggtgctacgctgtggccaccgacaaccacggaggcgggatgggggcgatcgtgttgttgccgctgtgcgtggacgatgccgcactcgaccgctgcctggccgcgctggatgccggcacggcgccagggaccgcggtctggttggccgatgacgcacagaccgggccacgcgcgcaggcggtggtggaacactggctggcgcatacgccgctgcaggccgagtacacccggcgcgcgcggccactgggcgaagtcgcccatctggacgagatgctgcgcgcctgcgatggcctggacgtggccgtgctggcgccggacagcgtgccatcacccggctggttgcagcagttgcaggatgccttcgcccgcgatgccgcgatcgccaccgcaaccccctggtgcaatgccggcgagaccgccgcgtggccacggctgggcgagatcaatcccgagccgcaggacccggtcctgctggcgcacacctgcgcgacgctgccgacgctgcacccggagctgccatcggcggtcacccacgcggtgctggtgcgcggcaacgcgcgccgtcgcgccggcggcctggacgtggacagctacgctggctggaacgcggcactggtcgacctcagcctgcgcatggccggccttggctggcgcaacgtgctgtgcgagaccgccttcgtcagccgggcaggggaggcggtcagccgcgatggcgatctggaggccctggccgcgcgctggccggcctgggtaccgcggctggccgatttcctgatgcgcgacccgctgcacgggctgcgcgccgacctgcagcagcgcatgcggcaggcgataatgccgaaggaacagggcgacctgttcgtcccgtcagtgccggagccacccgtttgaatgttgccatcgccgccatcgtcgtcacttaccagagtgggagcaccatcgatgcctgcctctcgcgcctgcgccaggcgcaggatgtggccgagatccgggtgatcgacaatggttcgctggatggcaccctggacatcgtgcagcggcatgccagccacgatccacgcgtgcgcttcgtcggcaacccggacaatcccggcttcgccgccgccaacaaccagggcgtggccgactcgcacagcccgtggctggccttcatcaacccggacctgatggtcgagccggacacgctggccgaactgcgctcccgcgccgaagcgctgggcgactgcctgctgggcgttgaacaggtggacgagcatggccatgccgacgaggcggtgcgccgccgcgacccggatttcctgaggatgctgcgttcgcccggcaagggctcgaagctggcggttccgcgtgagccgcaccaggcactgcagcgggtgccggcactgtccggcgcactgctgatgatgccgcgcgcgctgttcgaccgtatcggtggctgggacgcgggctatcgcctgcacgccgaggacctggacctgtgccggcgcgcgcgcgaagccggcgcggtggtagcgatcgccaacgacctgcaggttacccatgtgcgcggtgtctccagccgctcgcggccgttcttcgtggaatggcacaagcacagggggctgtggcgctacttccagaagttcgaggccaggcagcgttcgctgccggtgcgcgcggcggtatgggctgcgatctgggcgcatgcgctgatgctggtgccgcgcctgctgcgcaggtcgttgtagagccgagcccacgctcggctgcatggaaagggtcatccacgcatggtgtggctccactcgccgcgcccacggttcactccgccgggcgcataatccgccccatgcctatcatccagtccctgctcgacaccgacctgtacaagttcaccatgatgcaggcggtgctccaccagcaccccggcgcccaggtgcagtaccggttcaagtgccgcacccccggcatcgacctggcaagctacatcgcccagatcgatgaggaaatcgaccacctgtgcagcctgcgtttcagcgacgctgaactggactacatgcgtggcctgcgcttcgtgaagccggacttcgccgatttcctcggcctgttccatctggaccgcaagtacatccagctgcgtgcgtcgacggccgtgcccggcgagatcgagctggacatcaccggcccgtggctgcacaccatcctgttcgaagtgccgctgctggcgatcatcaacgaagtctggttccgcaacaccaccacggccgacttcgccgaaggcgagcgccgcctgcaggccaaggccgcgctgctgcgcgatacccccggtttcgagcactgccgcatcgccgactacggcagccgccgccgctactcgcgtgactggcatgcccgcctgctgccgctgctgcgcgacgcgctcggcccgcagctggtcggtaccagcaacgtccacttcgcgcgcctgtatggcatgaccccgcacggcaccatggcccacgagtacctgcaggcgttccaggcgctcggcccgcgcctgcgtgattcgcaggtggcagcactggaatcgtgggcgcgcgagtaccgcggcgatcttggcatcgcgctgtccgacgtggtcggcctggacgcgttcctgcgcgacttcgacatgtatttctgcaagctgttcgacggtgtgcgccatgactccggcgatccgttcgactggggcgaccgcatgctggcgcatttccagcagcgccgggtcgatccgcgcagcaaggtgctggtgttcagcgatgggctcgacatcgccaaggtgatgcggctgtacgactacttccgcggtcgctgccaggtcgcgttcggcgttggcacccacctgaccaatgacctcggcccgacgccgctcaacatcgtcatcaagatggtccgctgcaacggccagccggtggccaagctcagcgattcgccgggcaagagcatgtgcgacgacccgggttacctggcctacctgcgccaggtgttcgaattgccgcagccggagtaataccggcctgcagggcttacaggtagtcgacgaccaccaggtaggcgccctgcagcggctgctgcttcgaagcctgcacgctgtagcgctcggagaaggcgatatcgccggcgcgcatcgcgctggccgacaccgacagcttctggccctggcgcttgccgtcacgcagcgtcgccgcctggccatcggccagtgccgtcacggccaccgtcgagcccttggccgacggtgggcaggccgccaggctcagctcaccctgggacaggttcgtcgtgcagcccggctcggcgatacggccgctgaaacggatgctgccgctgctggcctgggccagcgcactgacggacatcagggccacgcacagcagaatggagttcctcatgacacgttctctggttcggtgtgtcctagttagcgacaggatcgatcaacctttaataggacgattccgaatctgctagggccatcaccaagaaagagtgatgcgcatcaaagaagccaaattccccctgaaaaatgcctgtttccgcgcgtgccgaacgcgtcgcgcaatgcgacatccccagtcgtttgtagcgtgaccggaccccgcgtcaaatcccccgcaccccgaggctgtgatttcgcctaacacgtcacatttaaggcgtcaatgaattggcgttcagaaaaataatgagactttcatcacagttgtgcctatacttgcgtcacggattcagggagaggtatgtccgagtccggccacaggtgagacgcaaggatgggtcttgttagcccggcagtgctccttgcttcctcctctacttctcatctcttcagtagggttaggtaaaagcgaatgcacaagatgaacctcattgccgctctgatgctggccgccgctccgctggccgccaacgccgccgacggcaccatcaccttcaatggcaaggtgaccgacaagacctgcaccatctcgaccccgggcggcaaggacttcgccgtgaccctgccgaccgtgtccaagaacaccctggccaccgccggtgccgttgcgggccgtaccccgttcgccatcaacctgaccaagtgcagcgccggcaacgtcgccacctacttcgagccgggttcgaccgtcgacttcaacagcggccgcctggtcaaccaggcctcggccaacgctgccaccaacgtgcagctgcagctgctgggctcgaacaaccagttcctgccgatcaaggctgccggcgctggcctggcgcagaccaactcgcagtgggtcaccgtcggcaccgacggctcggccgatctgaactactacgctgagtactacgccactgccgccgccaccccgggcgacgtcaccagcagcgtcaagtacacgatcatctacaactgatcgtcgtcgtacccgcattggccggcgtacgcgccggccagtgcttcgcggcccctggccacacccctcgagcgtagtacttccgatgaaagcaatctttccccgggcgctgctgctggcagcgttcacgctgcccttctgccagaacgctctggccggcgtggtggtcaacggcacgcgagtgatctatccggcgcaggcgcgcgaagtgaccgtgcaggtcgacaacgtgggcgattcgccggcgctggtccaggcctggatcgacagcggcgacgccaaccagaccgccgacaacagcgacgccccgtttgtactgacgccgccgatcgcgcgtgtcgagccgggccgcagccaggcgctgcgcgtgatcttctccggtgcgcagctgccgaccgaccgtgagtcggtgttctggctcaacgtgctggatgtgccgccgtcgcccgacaacgccgacagcggcgaccagaattacctgcaggtcgcgttccgttcgcgcctgaaactgttctaccggccgcagggcctgaagggcgtcgccaacgacgcgccggcagcgttgcgctggacccgcacgggcgatcgcctgcgggtggaaaaccccagccccttccacgtcacgctggccgaagtgcatgccgtgaccggcagcagcgagaagaccgtcgaggacaagggcgccatggtcgcgccgaagcagagcctggagttcaccgcaccggcgggctccgaccaggtgcgcttcatcaccatcaacgattacggcggtcgggtggagcacacggtccgcctcggcagtaccgggggctgaacgcgccgcgccggccatgggcctgcgcatcccgccaccgccgccgtgcggcgaattgaaggaatgtcagtgtgatcggaaacagattgacattgtcgatccaccaggcgatctgcctgctggttgctggcgtggcctgcccaggatgggcgctggctgcgccggccaatctcggcgaacaggcgctgatggcgcagagcggtgcggccaatgcgcgtgcacccgagtcggcccagttcaactccagcttcctctccggccaggccaagcaggtcgacctggcctccttcaccaatggcaacccgatggtggctggcacctaccgtgtcgacgtctacgtcaacggcggctggcagggccgtcgcgatctgcagttcaaggccgatgagcagggccgcgtcgacgcctgcctgccgctgccgatgctggaagaaatgggtgtggacagcgaggccgtgctgctgcagcaggacccgacgctgccgaccgacacgaccagctgcgtgccggtacagcggcgcatggccaatgcctatggcatctatgacagcggcaacctgcgctacgacctcagcatcccgcaggtgttcctgcgccgcgaggcgcgcggctacgtcaatccgtcgctgtgggaccgcggcatcaacgctggcttcgtcggctacagcttcaacgccatcgacagcgacagccgcgttgaaggggggcagcgcaatcgcagcgcctacctcggcctcaacgccggcctgaacctgggaggctggcagttccgccacgattccaacctgacctggtccgaaggcaacggccgccactggcagagcattgccacctatgcgcagcgcggcatcccgcaggtgcgcggcatgctcaccattggtgaggcctacaccacgggcgagctgttcgattcgatcggctaccggggtgccagcctggccagcgacgaccgcatgctgcccgattcgctgcgcggttacgcaccggtcgtgcgcggcattgccgaaaccaacgcgcgcatcgaagtgcgccagaaccagcagctgatctactcctccaccgtatcgccgggcagcttcgtcatcgacgacctgtacccgaccggctacggcggcgacctggaagtgagcgtgatcgaggccgacggccgccgccgcgaattcaaggtgccgttcggttctgtgccgcagatgctgcgcgaaggcgtgtcgcgctactcgctgaccgccggccaggtgcgcaacaagctgctggccgatgagccgtggctggtgcagggtacctaccagcgcggcatcggcaaccagttgaccctgtacggcggcagcgcgctgagcgaaggctacctgtcgctgctgtacggtgtcggcctgtccacgcgcgtcggtgccttcgctgccgacgtcacccatgcacggacctcgttcgaccactacggcagccataccggcgccagtgtgcggctgagctacagcaacatgatcggcgagaccgggaccaacctgaccctggccgcctaccgctactccactgaaggcttctacagcctgcaggacgcgctgtatggccgtgattcggacaagcgcggcatcgatccgaccacccgtggccgtcagcgcagccagttccaggtaacgctgaaccagccgctgggccgacgtggcggtgcgctgtacgtgaccggctcggtgcgtgacttctacgaccgttccggcacctccaagcagtaccaggtgggctacaacaacgcctggcgctcggtgaactacggtttctcggcgctgcgcaccgaagaaggcgtgctcggccgttccgatacccagtacctgctgtcgatgagcgtgccgctgggccggggcacccacccggtgtcgttcagcgccgaccttggcgcgcgcgaccgcggtggctacgacaacagccgcgtcggcatcaccggttcggccggcgtcgacaacaacttcagctacggcgtggccctgtccgattcccgcgagggtggcaccactgcggtcggcaatgccgagtaccgcagccgctactcggcgttgaacgccacctacagccactcgcgtgatttccgccaggcgtcggtcggtgccaacggcagcgtggtcgtgcatccgggcggcttcaccttcaccccgcagcgcggcgacaccatggtgctggtcgaagcgccgggcgcgcgcgatgcgatcgtcagcaacgcgccgggcctgcgcgtcgatggccgcggctacgccgtggtgccgtacgtgtcgccgtaccgcctcaacaccgtcaccctcgatccgcagggcatggcccacgacgtcgaactggaaagcaccagccagtccatcgcgccgttcgccggtgccatcagctacctgcgcttcgacacccgcaagggcaacgcgctgctgatccaggtgcgcaacgccgatggccgcagcatgccgttcggtgcgcaggtcaaggacgaacagggccagccggtcggcatggtcagccagggcggccgcctgtacgtgcgcagcgagaagaaccagggccagttgcaggtcgagtggggcgccggtgccgaccagcgctgcaccattgattaccaggtaccggcgggcgccgatgcgtccaagaccggcttcatcccgctggaggcagcatgccgatgatttcttcccgtggccgcaaggcgctggccgcgctggccgtactgggcggcgtgctgctggcgcagcaggccagcgccgcctgccgcatccagaacagctggttcatcgcccaggacgtgaccatggacatgggccagatcgtgatcctgcccagcaccccggtcggcggtgtgatcaaggaaatcagtgaaccgatcacccagcagaacagcgttgcccgctgcgattcctggaccggcggtcgttcgatcggtgagtacgtcaacgcagcgcagaagcgccccgtggccggcttctcgaacgtctatgaaaccgatgtggcaggcgtcggcatccgcctgtaccgcgattcgggtgcgatccagacctactacccgcactcgatcaacttcggtggcggttccgtggtcagcctcatcggtggccagttccgcatccagctgatcaagaccgctgcgcagaccggttcgggcgtgatcgcgccgaacggccgcttcaccaactactacttcgacggcgatggccccgggcgcccggtactgacctcgacgttcaagggctcgggcaccaccgtggtcagcccgacctgtgaagtgcaggccggcagccgcaacattgccgtcgatttcggcagcgtgcccaacaccaccttcactggtgtcggctccaaggccgttgatcgcgacttcgagatccgcctgaactgccagggcagcaacgttgccgcctaccagagcaagatcggcatccgcctcgatgccgaccaggacagctcgaacatgccgggcgtgctgaagctgagcgcggccagcaacagtgccacccgcatcggcatccagatggtccagcgcgatagcagcaccgagcgtgaagtgcgcttcggccagaccatcagcgttggcaccaccgcgccgggtaccagcgtcatggcgctgccgctgcgcgcgcgctacgtgcagacccaggccggtacggtgggcgcgggtgtcgcaaacggccaggccacgttcaccatccagtacgagtaaggccgccccggcggctgcccctgctgcgttccgccgcaacgtcgcccggctcacgggcggcgttgactgcgtcttgatcctgcaacgatgaagatcgatgccacgacgcgcatacagacgccttagtgtgatgtatgtcgcgaatttggagtttcctcatgaggtgaccgtctcctgcctgcgggtgctggacggcaacaccgaaaggatccagacgtggctactgctgcttgcccccttccgcgccggctttcgggagcgctccggtgaaggtcctgtcggtgttcggcacgcgaccggaagccatcaagatggggccgctggtgcgcgccctggcacacgctgcggatatcgaatcggtggtctgcatcaccgggcagcaccgggcgatgctcgaccaggtgatggcgctgttcgagatcaccgccgaccatgacctcgatgtcatggtgcccaaccagaccctcaatggcctgtgttccaggctgttcgaacggcttgacgcgctctacacgcaggtccgccccgactacgtgctggtgcatggcgataccaccacggcgatgaccgcggccctggccgcgttccatcaccgcatcccgatcggccatgtcgaggccggcctgcgcaccggcgacatccaccggccgtggccggaggagatgaaccggcgggtgatcgatgtggtcggccatcagttgtatgcacccactcccggctcgcgcgccaacctggcccgtgagcatctgggcgggcagatcctggtcaccggcaacaccgtcatcgatgccctgcagcagaccgtgcagcggctggatgccgatccggcactgcgtgcgcaggccgacgaacccttccatatgctcgaccccggccgccggctgctgctggtcaccggccatcgccgcgagagtttcggccagggcttcgaggacatctgccgtgcgctggccgagctggcacggcggccggacctgcaggtgctgtacccggtgcacctcaacccgaacgtgcagggcccggtcaatgcccacctcggcaacctcgacaacgtgcacctggtgccgccgcaggattacctgcgcttcgtgcgcctgatgcagcgcgccgacgtcatcctcaccgactccggtggcgtgcaggaagaagccccggcgctggccaaaccggtgctggtgatgcgcgatgtcaccgaacggccggaggcggtcgaggccggtgtggtcacgctggtcggcactacgccctcgcgcatcgtcgatgcggtcaacgcggtgttggcacgccccccgcagccggcccgcttcgaccccgatgccagcccgtacggggatggccgcgccagcgcccgcatcgtcgccgccctgcgcggtgcgccccttcccgaattctcgcccggcgtccgcagcagcggcgccgtccaccccatccacgcgaagtgacgccatgacccagaccggccgctcttccctgtttgcatccgccgctgcgttcgtcctgtcgggcgtggttggcagtgcccatgccgccgacagcgtcgccggccagttcaccgaatggagcagcgacagcacggtgaaccggcagatgaccctgcgcgaactcggtttccgccagccactggtgctgagcgggcaggagagccagcgcgaggtctacctgccggtgccggccggtgtggccacccgcgacgcgcagctgcagctggatgggcgctatgtgcgcggccacgccgggcgcacctcgggcctgtggtcggtcgatggcgacccgatcgcggcgcgttcgatcaccgatgcccagggcgatgccagccagctgctggccatcgatggcgaaccccgccagagcggcttcgtacgggtcggcgtcggctggtggtcgatcgtgtccgattaccagtgcgccgaccagagcgcgccggccaatgtgctgcggctgtcgccggactcgcgtttcagctaccgcttcgacggccgcgccgtggataccgtggccaaggcgtggggggcgctgccaccgcgggtgcgcctgctggtggatggcaaggcgctgcaggcaccggcctacgatgcggcttggcgcatcggtaccgcgttgcaggccgggggcaaacaggtgcaggtggtggccctgcccaaggtcggtgacagcgttgacctggccggtatcagcatcccggccagcctgcagggcgtgccggcctacgccgcgctggccacgggtgagcgcgcgcatgcgatcagggatctggccgaagtcggcgcgctgctgtcattgcgcgacagcgggccgttggccgccgatgtgatgatcggcagcgatgcactgcgcgccggcgtgcgtgcggcgctggatgcgctggccgtacaggtcggcgcggcaggggccgatgcgggcaccgcgttcgccgcgtggcgcggcaccggcatgggcggcctggaaaagcccgccgccaacgcgtcggtcagcgtggtggccgtggccgggcgtccgacgctggtggtcgacccggcggcggcgggcaaggtcgccgggctgctcgccgagcagtggcgcagctatgcactgggccgcagcctgcaggtcagcgcagcgggcacgcccagactggacggtgaccaggtactgctgagccggctcggcaacatcgccggcaccatggatgtggtgacccgcgccgaccgcagcgccagcttcgacctcggcgcactgtcggccgatggccgcctgcccgagcaggtggtgatcgatgtctcggcggcccccaacgcggccgggcagggcgcggtcgccacgatctacctcaacgattacctgctgggtggcaagctgctgtcggccaacggccagccgcaacggctggtggccaaggtgccggcctacgcgctgtcggcacgcaacgagatccgtgtcagcttcctgcgccagccggcgcgtccctactgccacgatccggccacgggctatccggtctcgatcctgcccagcagccacctgaccttggccaagcgttcgctgggcagtgacttcgtgggtgccagcagccagctgtcgcgcggcaaccaggtgttcgtgcccggcacctggctgcaggatgcgccggcctcgctcggcaaggtcatcgcggtgaccagcgcagtgggcgcatcgccggaggcatcggaactgaaggtggtcgaagccggtgccgtggtcagcccgggcgcgccgtggctggcgttcggcgtggcgccatccggtgtcgatatggccggcctgaaggatggccacctgctgatcggcggcaagccgcaaccgctgttggatgtgagcgggctggatcgtgccgcggtggtgcaggtggggtcgtccggtggccagctgggcgttgtttacagcgacctcggtgcgcagtcaccgccgttcggcgccccattccgtttgctgcggggcgatctcgccgtgctcgacggcagtgatgccgtgcgcgaattcgaccgccaggatccctacggcacgcgtatcgcgcaggacggcaacccgcaatcgaagtgggaacggcacatggtctggctgctgctgctggtcggcgtgatcgtgttcgcgctgctggccgcccgcgtcacccaggtgcgtcgccgcaagtccgccaacacagggcactgatccaccgtggacggtctgttctggaacatccagctggccaactactacgccgccctggaaaccacggcggcggcggtggccgtgctgatcctgatctccagcctcgatgacctgttcatcgatgtctggtactgggtacgcgagagctggcgcgcgctcacgatcaagcgccgcgatgcctaccggccgctgacccaggacgacctgctgcagcgcccgcagcagccgctggcgatcatggtgccggcgtggatggagtacgacgtcatcgcgcagatggtggagaacatgatcaacgtgctcgattaccgcgagtacgtcgtgttcgtcggcacctatcccaacgaccagcagaccatcgatgaggtcgagcgcatgcgtcgccgctacaagcgcctgcgccgcgtggaagtgccgcacgacgggccgaccagcaaggccgactgcctgaactggctgatcctggcgatcttcgactacgagaagcgccacgacatcgagttcgccggggtgatcctgcacgatagcgaggacgtgctgcatccgatggaactgcgcttctacaactacctgctgccgcgcaaggacatgatccagctgccggtcacctcgctggaccgcgagtggtatgagctggttgccggtgtctacatggacgaattcgccgaatggcacgccaaggatctggtcgtgcgtgaaagtgtttccggcatggtgccatcggcgggcgtcggtacctgcttctcgcggcgcgcgctgctggcgctgagcgcgcagaccggcaaccagcccttcaacaccgacagcctcaccgaggactatgacgtcggtgcgcggttggcggcgatgggcatgcagtcgatcttcgcccgcttcccggtgcagttccgcgtgcgtcgcccgtcctggttcggctgggggccggtgcgcgagcgcacccagcagatggcgctgtgcgtgcgcgagtacttccccgacaacttccgtgcctcgtaccggcagaaggcgcgctgggtgctgggcatcggcctgcagagctgggagtcgctgggctggcgtggctcgctggccaccaagtacctgctggcgcgcgaccgcaagggcatcatcacctcgttcgtcagcatcattgcctacctcatcttcctgcagctgctgctgttctggctgctgaagatgtccggggtgtggacgatgcagttccccagcgtgttccaggccggtacctggcagatgaacgtcgcgctgctgaccaccgcagcgctggccacccgcgtcgtgcagcgcttctacttcgtcaaccggctgtacggctgggagcatgccttgatgtcgatcccgcggatggtggtcggcaacatgatcaatttcatggccaccgcgcgtgcgtggaaggtgttcctggcttacctgctgttcggcaagcgcatggtctgggacaagaccatgcacgacttcccggatgcggcgcagctggtgcagacgcgcaagcagctcggcgagctgttgaccacctggcaggcggtggagccggagcgcctgcagcaggcgctggaccagcagcatgccggccggcagcagccactgggccgcatcctgctcacccaggggtggctggatgatgaaacgctggccgaggcgatcgccttccagggcgacctgcctcgtgcggtgatcgacgtggactacctgcgcgcctgccacttcccggtcagtgccgatgcctgcgtgcaatggcgcatgttgccgctgccaccgcgccagcagggcaccctgcggctggccgtggccagcccattgcccgaagaagcgttggcgctgctgaagcaggaaacccacagcgagcacatcgaacagagcattgcccgcgaaagcgaaatcaacgcaggcctgcgcctgatcggcggcgaccggcactggcagctggacaacgtgcccctgctgggcgacctgctggtggagatgcgcctgatcgaccacgcgcgcttcgagatcgcattggacgcgtacaagccgcagcgcgacggccgcatcggcgattacctggtcaagcagggcatcaccaccgaagacgccgtggcccaggccatgcaggagcagcgccggcgtgcggccgcgctgcagtcgccgcctcccggagccttgccggcatgaagaccacgctgctgtcctccgtcattgccgtggcactggccacggcggccgcgccggtgctggcccaggccgatgcagcactgccgttgtccggtgcggcctaccgcgtcgccgagcaggcgtttgccgcctatgagcgcggtgactacccggcggcttaccggcagtccaccgaagcgatccggctgcgcccggacgtggtgcggctgcgcctgttgcagatctatgcgctgcagaaactggggcggggtgccgaggcccagcagcaggcacgtcgtgcactggatgcggggttgaaggatccggcgttgccggcgctggccgctgccaccgctgcgcgcagcacgcccccggatgccaggagcgggcgtgcaccctccccaccgcgcgtggctggcagcggcgcagaccgcgccaggcagcaggcctacgcgctggccaccgaggcctacgccgcctatgacgccgggcggatgggagaggcagccagcaaggccgagcaggccttccggcagcagccaacgcagggcgcctgggcgatgctgtgggtggccgcgctggaggcacagcagcagcccgaacaggccgacgccgccattgccaccgcgctgcagctgggcgcgccgaatgtcgaggcattgcgcgcacggcgcgtggcgctggatcgacagcgcgcgctgctgcaggcccagcaggcgtaccggtcgctgtccacgcaggatgatgccgcggccgttgcgcaggcacgtgccgctgtcgagctggcaccggaggtggcgacgtaccggttgctgctgattaccgcgcagctgcagcaggggcagctggccgacgccgagcgcagtgccgaccaggcgttgcaggccgacggccaggatctcaatgcgcgggtgatgcgcggctacctgcgccagcgccagggcaacagcctgctcgccaacgaggacttcgacgccgcgctcgccatgccgggctcaacgacgcagcagcgcaacgtgcgcctgctggcggtggatgcggccctggccgctggggatcgcgcacgtgcggctgcactgctggcgccgctgcgcgcggcattgccagcagatgccagcgatgcacgcgcgcagcagctgctgcagcagggcatcgagcagcgcgccaaggcggtccgttccagtcgcgagcgtccgcgtttgagcgcgcagacctatccggcgccgttccagcactgccagtctggcgacagcggcaaccgttgcgagttgatgccggccgacctgcagggcgagggtggtgccgcacagcgtgcctacgcggcctacgcgcgccgggactatgccgaggccatcggtgaggcgcggcaggccgtgcagctcgcaccggacgacgcgagcctgcacggcctgctgaccaccacgctggcggcaggcaaccgcagccagcaggacgaagcacggcagcgcctggatgcggcgctggcacagcgccctgacgatgcggaggcgctgatgcagcgcggctacctcaaccagaaggcgcacgagccggcgcgcgcactggccgacttccgtgccgccgaggccaccggcagggcaccaaagggcgtggtgcttgaccaggcctacgccagcgcggccaacggcgatcacccgcaggcgctgaccctgctgcggacggccattgatcgtgccgatgccggtgagctgccactggatgcgcaccagcgccacaacgtgcgcaatgccatcgccaactattcgcgcgagtggggcgtgatcgcctcggccggcttccgtggcgcgcgccaggcggcgaccaatgtcggcggcgcggcgatcagtacgccgggtgattcggtgttcagcacgcttgaagcgttctggcgcccgccggctttcaatgaccagcacggcacgctggagctttacgcgcggctgctcaacaccctgtacgacgagggtggcacctacgagtcgatccgcgccgtggacccgtgcaccggcgaatcgacgcccgatgcacgcgcgcgcgccgaacggctcagccgctcgcgttccaccaccggctggccgtccaccatcgcctcgttcggcctgcgctacgccttcggccagaccggcctgagcgccggcatcgagcgtcgccagttcctcggcagcgccacccgcacgggcgatgtctaccccgcttcggcggccgtgcaatgcagcctgcagctggcccgcaacccgccactggaagccagcacactggcccgctaccgcctggccagcggttccggtggctggatgtcctacctgacctacggctattaccacggcaccgacctgcgcaccgacgtgaatcagtggtggatggtcagtggctacgcgcagggcggttacacgtgggatgacaacagcgcgcatttcaccctcgacgcactcgatgccaatggcacgccggtgcgccgggtgggcgatggcaacgggcgcctgcatcgcgaacagtggttcgctgccggtgaactgcgtgccggccgcagcttccgctttggtgccgggcagacccactgggtggtcacgccgtatggggtggtgggggcggactggctggaccagcgctcgcgcgtgcgcgacatccgctacccgctgttcccgacgcagtcgttcgcactcaacgatacgcagcgcagctggtcactcggcgcagggccgggcgtgggcgtgcgctactggttccgcgaagaccactacaacacgccgcgttcctacctggacctgaccgtgcagtaccgcttcgcgatcggcggcggtgatacgcagcgcgccaagggcctgttcgccaccgccatcctctcctactgagccagcccccagcgtcgccgcagcgccgccgcctgcggcgtgtcctgggtcagccacggctccagtgcatagaccagcacgtgctgcgcaccgctgtcgtgcgcccacgccagctgccgctggatgcgcgcggcatctgcggtttcgcccttgaacgcgctgccgtcggcggggctgccgggcagttcgcggaacagttcgacgatcgcatcgaacccgatgccctgtgcccgcaaatggccgagcagcggttgcagctgctgcacgttgccggcgccggcaacccccacgccgtcctgcaccatcggccgcagcgcggcccgtgccagcaccgcctgccacagcgcgaccaggtcgccgtcggtctgcaggcggctgaagtagcaggagatcgcacagtcaccgccgcgcgcgctggcggcctgcgccagcccgtgcagccactgcgccagccattgctggcgggccggatcggcccagtggtactgctccagttcgtagggcaggtaccagccgccgaaggcgggctgctgcgcccacggcgcctgtgccaaccagctgcgcgcgtgcgccaggctgtcggccaggaacgcctgcagcgtggcgtcgtcggcgccgatggcctgccaccagcgttgctggaagggcaggccaacgcggatgcggatgtcgttctcgctggcggcggtgaacagctgctgcaggttgctgtccggcagcgaccagtcgccatcgctgccaccgacgatgccggtccactgcagcaccagctgccggcagcccagcgcatgggcaagcttcaaggaacgttgccagtcggctggcccccactgcagatggctgcgccagggctgcaggaaggtgccatccacctgcaccggcagcgaacagccgggcagggtggcgagcgtagcggccaacggcgccagcactgccgcgcgcagcaaccggcggcgcaacggcgaagacggatccgtgggaaggtcgggccgaaccatgcccgcatcatcccagagcaccgtgggtgggaggtgaaccccgcgccgggtggtgccggccgctggccggcatcgtgccccgggtggcaggtgaatcaccatccggtagtgccggccgctggccggcatcgcgccccgattattccaacgcgtagcgcagcgcgaacagcaccgccaccagccacaccgccggatgcacttcgcgccagcggccggtgccggccttcagcgccgcatacgcgatgaagccaaacgccaggccattagcgatggagtaggtgaacggcatcgccagggcacacagtgcggccggcaccgattcggtcaggtcgctccagtccacgtccaccagttcgcgcagcatcaggccggccacgaacagcagcgccggtgcggtggcatagccgggcaccatcgccgccagcggcgagaacagcagtgcggccaggaacagcgccgacaccaccagtgcagtcaggccggtgcggccgcccacctgcacgcccgaggcgctttcagcgaacgcggtagtgctgctggtgcccagcagcgaaccggccacgatcgccgtgctgtcggccagcagcgcgcggccgaaacgcttctgcgcgcccggcagtttcagcagtccggcgcgaccgaccacgccatacagggtgccggtggcatcgaacacttccaccagcacgaacaccagcaccacctgcagcaacacggcgatcggcgcgccaccgttgtggtgcagcaggcccggcaggtccagctgcaggaaggtcggcgccaggctcggcggcagcgagaccaggccctggtactgcacgtcgcccaatgcccagcccgcgccggtcaccgccaggatgccgatcaggatcgcgccacggatacggcgcgcttccagcacggcaatcagcaggaagccggccagcgccagcagcggcggcgccgtgttcaacgggcccagcgccaccagcgtgtcttcattgccgacgattacgccggatttctgcagcgcgatgatcgccaggaacagaccgatgccggccacgatcgccgaacgcagcgaggccgggatgcccgacaccagccacgcccgcacaccggtcagcgacagcaccaggaacaccaggccggagatgaataccgcgcccagtgcctgctgccacggcaggccggcggcaccgaccacggtgaaggcgaagaacgcgttcaggcccatgcccggtgccatgccgaccgggaagttggccgccagtgccatcaccgccgaacccagcgccgcggccaggcaggtggccacgaacaccgcacccgcgtccatgccggtggtgccgaggatctcggggttcacgaagacgatgtaggacatcgtcaggaaggtggtgacaccggccagcagctcggtacgcacggtggtgccgtgctgctgcagctggaacaggcgctcgaacagggacatggggcttctcgcgacaataaggtgtcacgaccaacggtcgtgacctacccgaatgcagaacggccgcgcagagcgcggccgttcttcctttcttacttcagcgccttgaagcgcaggcgcttcggcgcggcatcgtcgcccatgcgacgcttcttgtcttcctcgtactcgcggtagttgccctggaagaactccacgtgcgagtcgccttcgaaagcgatgatgtgcgtggcgatgcggtccaggaaccagcggtcgtgcgagatcacgaaggtgttgcccgggaactccagcagcgcgtcttccagcgcacgcagcgtttcgatgtccaggtcgttggacggttcgtcgagcagcagcacgttgccgccctgcagcagggtcttggccatgtgcaggcggccacgctcaccaccggacagcgagccgaccatcttctgctggtcctggcccttgaagttgaagcggccgatgtaggcgcgcgactggatctcgatgccgttgatgttgaggatgtccaggccaccggcgatttcctggaagacgttgtggttgccttccagcttgtcgcggctctggtccacgtaggacagctgcacggtcgggccgatcacgatctcgcccgaatccggcttctcctggccggtgatcatcttgaacagcgtcgacttgccggcgccgttcgggccgatgatgccgacgatcgcgcccggcggaatcagcatcgacaggttgtcgatcagcaggcggtcgccgaacttcttggagacgttcttgaactccatcaccatgttgcccaggcgctcgcccggcgggatgaagatttcgttggtctcgttgcgcttctggtaatcctgcgactgcagctcttccaggcgggccagacgggccttgcccttggagcggccgcccttggcgttctggcgcgaccactccagttccttctggatcgccttctggcgggccttttcctggttctcttcctgcttcaggcgctcatccttctgcaccagccattcggtgtagttgcccttccacggaatgccgcggccgcggtccagttccaggatccactcggcggcgttgtccaggaagtagcgatcgtgggtgacggccaccacggtgccggtatagcgcgccaggaactgttccagccattccaccgactcggcgtcgaggtggttggtcggttcgtcgagcagcagcatgtccggcttctgcagcagcaggcggcacagtgcgacgcggcgcttttcaccgccggacaggttggcgatcttggcatcccacggcggcaggcgcagcgcatcggcagccacgtccagctggttttccagggtgtgcgcgtcgccggcggccaggatcgcctcgaggcgctcctgttccttggccagcgcgtcgaagtcggcgccttcctcggcgtaggcggcgtacaccgcctccagcgcggcctgggcctgcagcacttcgcccacgccttcctcgaccgactcgcgcacggtcttgttcgggtccagttccggttcctgcgccaggtaaccgaccttgatgccgggctgcgggcgggcttcaccctcgaaatcggtgtccacgccggccatgatcttcagcacggtggacttgccggcgccgttcaggcccagcaggccgatcttcgcgcccgggaagaaggacagggaaatgtccttgatgatctgccgcttgggcgggaccaccttggacacgcggttcatggtgtagatgtattgcgaggacatgcggtctccgtaggcgcggccctgcgcccgacccgtcacgggaacatcccgttgcggcagcgggcacagactggaatggaataccgccaattatagccggaaccggttccggcccgcgcccggccggagccgcgcaggctggccgtggcctgaatactccgtcacagtcctgcagcgggaagcgtttccagccggaaacggttcagatcggttgcgcaatatgggctcaccacccatccaagcagaggtctgacatgcgcatcaatcgagtaatggccggcgccgtggctccggccttcgccgacaacgaccatcgccgcgaccacgaccgccgcgagtggcgcgaggatcgccgtgagtggcgccaggaccgccgcgactgggagcgcgaccgccgcgaggcccggcgcgactgggaacgcgaccgccgcgactggcaccgtgaccatgatcgctactaccgcccggcaccgccgcgcgtggtctatcgcccggcctatggcccgggctatggctggaaggtcggccaccgctaccgcgactactaccgcggcccggtctacgtggtgaacgactacccgcgctacaacctgcgccgcccgccgtacggccatcagtggatccgggatgatcgcggcaacatgctgctggtggccatcgccaccggtgtgatcgcccagtacgtgctcagtcgctgaggatcgcggccggggtcggatccctttccaacggaaagggctctgaccccacaactatcgatcgaaaccatacggggccggattccttcggggatgccggccccgtccgtttcggccccagcgggccagtgcggagctacaatcgagggctgagccgtaccccttttccctgcctgctggagtacccgatgttcccgcgtgacgtccgcatcgaatcctacgatcccgaactggccaaggccatcgccgctgagacccagcgccaggaagaccacgtcgagctgatcgccagcgagaactacaccagcccggcggtgatggaagcccagggcagccagctgaccaacaagtacgccgaaggctacccgggcaagcgctactacggtggctgcgaatacgtggacatcgccgagcagctggcgatcgaccgcctgaagcagctgttcgatgcggactatgccaacgtgcagccgcacagcggttcgcaggccaaccaggccgtgtacttcgccctgctgcagccgggtgacaccatcctcggcatgagcctggcccacggtggccacctcacccacggcgccaaggtcaatgcctcgggcaagctgttcaacgccgtgcagtacggcgtcaacgaccagggcctgatcgattacgacgaagtcgagcgcctggccctggagcacaagccgaagatggtcgtggccggcttctcggcctactcgcaggtgatcgactgggcgcgcttccgcgccatcgccgacaaggtcggcgcctacctgttcgtcgacatggcccacgtcgccggcctggtcgccgcaggcgtctacccgagcccgctggaacacgcccacgtggtcacctcgaccacccacaagaccctgcgcggcccgcgcggcggcatcatcatcgccaagggcgccgacgaagacctggtcaagaagctgcagtcgatcgtgttcccgggcatccagggcggtccgctgatgcacgtcatcgccggcaaggccgtggccttcaaggaagcgctggagccgggcttcaaggcctaccagcagcaggtggtgaagaacgcccaggcgatggccaatacgctgatcgcgcgtggctacaagatcgtctccggcggcacccagaaccacctgatgctggtggacatgatcggcaaggacgtgtccggcaaggacgcggaagccgcgctgggcaaggcccacatcaccgtcaacaagaactcggtgccgaacgacccgcgttcgccgttcgtgacctcgggcctgcgcctgggtacgccggcggtgaccacccgtggctacgtcgaacaggactgcgtggatctggccaactggatcgccgacgtgctcgacgcaccgaacgatgacgcggtcatcgcccgcgtgcgcgacgccgtcagcgcgcagtgccgcaagtacccggtctacggctgatcggagagtggggtcagagccctttcctggcggaaagggatcggaccccgccttccggatcgacgcaggggtcggatcccttcccgcagggaagggctctgaccccggcatcggagtaaccgcgcatggatgagcgccacctcaagtacctgtacaccgcgctggcggtgctgtttggcctgcccagcctggtgatgggcggcgcggcggcgacgatgctgctgctgatggggctgggccagttcggtcatggcacgctggcctcggtgacggtgatgccgctgtggggcctggccggcattgccggttgcctggcctggttgtggctcagcgcgggttttctgctgcaggggcgtgccgggctgcacgtgcaccgcctctggtggtggatgctgctggcgggcggtctcgccgccttgcccccgctggggctggcgctgtggtggggcatcgccgtgcatgccgaaggcatcggcttgttgctgctgggcccgtcgatgctggtgccggctgcgatgctggtgtggatcaaacgccgcgcatgacgtggcccatggaaggaaatcgaacgcatggatgagcgtctgcacaaacgctggatggcgatcgccggcctgctggtgggcctccccgccgtggcggcaggcggcacgggtgccgtgctggggctgatggtcgtatgggacggcaagtacctgacgggcgacgagcacacgtggttgctgctgtggtcgtcggctggaatcatcggcctgctgtcgtggttgtggctgagcggcctgttcctgtggcgcggtgttgccggcctgcgccaatcaccggttgtcgcctgggtcggccttgcgctgggggtgctggccgcgttggccgtggtcgccgccgcgttgtacttcaccttcaagcatggggaaatctcgaccctggccttccttgggttcggcccgccgctgctggtgatggccgggcacctggcgtggctgcgctgggcacgcgcggccccggtgccgtcggcacctggttgaacgtctggtcctgctgacctcactgggcgctctggttggccgaaatgcaggtacttccgcgcagacagcatttgccgctgcgccctttctcaggtacctttgcgacgctgccatgaccgtggcaataggtactttcctgagccaggcgttccatgcactgccccttctgccaacatgccgatacccgggtcatcgactcgcgcgtctctgaagacggcgcgacgatccgtcgtcggcgtgaatgtgaagcctgcggcgagcgcttcagcaccctggaaacggtcgaactgaagctgccggccatcgtcaagagcgatggcacgcgcgaggcgttcgaccagcgcaaggtccgcgctggcttcgaccgcgcgctgcagaagcgtgcggtggccgaagacaagatcgaagcagcggtgcgtgcggtggttcaccagctgcgcatcagcggcgagcgcgaagtgccctcgatcaaggtcggcgagttcgtgatgaacgaactgcgcaagctcgatcatgtcggctacgtgcgcttcgcttcggtctaccgcagcttcgaggacgtggccgatttccgcgaggagatcgagaagctcgagcgcgacctgccgtccagtaccgaacagctgcagctgctgggcgatgtgatcgccctgaccaagaagaagaagggctgactgcctctgccttgggggtgccaaccttggtgggcaccggtggccgcattcactggtgggtgccaaccgttggttggcactgacggcatggatcaacaccggcggcgttaccatggctgcatgaccacttcgttctccgtcctcgaccacctgcacatggccaacgcgctgcgcctggccgagcgcgctgcctataccacccgccccaacccgatggtcggctgcgtgatcgcccatggcgaacgcgtggtcgggcagggctggcaccagcgcgccggtggcccgcatgcggaagtgttcgccctgcgcgaggccggcaccgaagcacgcggtgccaccgcctacgtcaccctggaaccctgcgcccactacgggcgcacgccaccgtgtgcgctggccttgatcgaagctggcgtgtcgcgcgtggtcgcggcgatgcgtgatccattcccgaaggtcgatggcggtgggttcgatctgctgcgcaatgccggcatcgacgtcgccgaagggctgatggcggtgcaggcgcgcgagctcaacaagggcttcctgtcgcgcgtggagcgcaatcggccgtggttgcgggtgaagctggccgccagcctggatggccgtaccgcgatggccgatggcagttccaagtggatcaccgggccggccgcgcgcgaggacgtgcagcactggcgcgcgcgcgccggtgcgatcctgaccggcgccgacacggtgctggccgacgacccgatgctgaccgtgcgcctggccgataccgaagtgatggcaccactgcgtgtggtgctggattcgcgcctgcgctcgctcgaatgcagccgcgtgcgcgagggcggggcaccgacgctgtacctgcacgctgcggcggtgagcgcaccggacgcggccgacgccgaattcgccagcgtgcccagcgcagaggggcggttggacctgggcgcggtgctggcgctgctggccgagcgcggcatcaacgaagtgcacaccgaagccggcgcgacgctgtccggtgcgctgctgcgcgctggctgggtcgatgagcttctgctctatcaggcgcccacgctgctgggcgacaacggccgcccgctgctggctggcctcggcatcgatgccatggaccagcagcgtcgcctgcgcgtggttgaccagcgccaggtcggcgaggacaacaggctgctgctgcgcccatgaaggaatgacgcagggcagggggctacgcccatggcgtcaggccgcttcgtcgtcttcttcgccaacggggcattggcctttccattgctgcttccacagcacatgcaggtcgcggcagtacgcgccgagcgcctcgcccggcagttgcctcgccttgaaccgcaactggcgacgcgtaaaaccgtcgtcgtactcatccggcagtaccagcacggcacactggtcgtggtacatcaggaagtcgcggcagtgatcatcctcactcatccacgcatccaggtgcctgtcgctcagctgcgttgactcgaaggcgaccgagggttggacgacgatgatcttcgtggctttgaacctggacgcctcggcctgccagcacaccatcagcgccagcaacatgagcgcggtcgacgtcatacggtgtttcatgcggttgccctggtggaagagggcaacagcattgaccatgcaggccgcgcagggccatgcaagggttctgaaaatgcagttgcccttgccgtcggcaacgctgggcagcgcgtaggctcggcgttacatcgcacttacgcgcattcgtcggtccacatcatctcggcgatcgggcgcagtgccttgcattcctgcgtcatgtcttcggctgacttcaccttggccttggccttcagttcctcggtcatggcatccacgccactgatctggtccggcgcgatcttcgccacgcaggcgcggtgctgctgcaacagcaggtcacagccgggtacgccggtcaccttcggtgcgctggccgcctgcgcgtcctgcatccagtcctcgaacggtgccagcgcgccggtcacggtacccaccagatcgtcgaagttgccgctgtaccagtagccgttgtccttggccgggtacagggtgaaggtgccgctgactggcacgcgcgcaccgctctgcagcgcctgggtgtaggcgtcggtgaactgcctgcgcgcggccgggctggcgtcggctgcaaggctggcggcgaacagcgggcgcaccttgccgaggtcgggcacctggcagctgaaagtgatgcgcgccagcttctggtcttccacgtactcgttgtcttcaatcacgctcttgctggcgcggcacttcgaatcacgcagggccttggcatacagcgcttcgctggcggccgcgtcggcctttgcgccggtgctggcaagcacgacctgccacggatcggccagcgccttggccagcgcacccgggttcggggtcaccgcgtcctggccttcgaacgccggcttcagtgcatcgttgagcgcgcgggtcgccacggcgtcatcttccagcagcacgcgtgcgtacaggtcgaaagcctgttcgggcgtcagtgtggccggggcggcgccggccagcagcggggccgccagcagggcgctggccagcagggtacgcaagggagtcttcatgacggtgtttcctgttccagaggcgcgcaagcgtagcgcatctttgcgcaggcccgttggtgcctgtggccgcctgccggcgcgcgcgggcccaaaaaaaacgggccccttgcggggcccgttcgatcgcacgacgaggagcgatcggtaaatcagaagctggcgcggacgccgaccgagtactgggtgacgtcgcggtagccggcgatctcgcccactacaccccaggtcttggtgaagttgacctggccgccgacggtgccgacccaggtgcccttgtagttgttgccgccatccatgtaaccggccttggcccaggcttcggtcatgcgcgacggcttgccgcggatacccatggtgacgcggcccaggttggtgtggtccttgccgtggtaacgcacgccgtcgtagcgcagggtcgattcggcgttctggcgcacccaggcggcatcggcggtgaagtccaggcggtcggtccacggcatgtggtagccgatacccagctccggctggttcagttccagcttcagcgagtcttcgccgtagtggcgggtcttgctggtgcgcgaccagccaccgaacacgtagacctgctcggccagcgcgaccgagccgcgcaggtagccaccgtcgaccttcgggtcgtccagcacgttgtcgtcaacctggacctgggtccagccgccttccacgtaggtgtagctcagggcgtcggccgaagccgagaacggagcagcggccagcagggcggccacgatcaggatcttgcgcatgggaattcctgtgaatttcagtccattggcgggcctgccctcgcggctgcccgtggcgacctcatgtcgtccgctgcggattttaatgaaagttttacaaaatgcgagagacggccgtcacaagctggtctggcttggccggggtcagagcccttttctgcggaaagggatccgaccccggccatcagagtgcgagccggcctgcatcggggtcggatccgttttccgtcggaaaacggctctgacccctcgcgatttcgagggacccggggtcagagccctttcctgcggaaagggatccgaccccggtcatcagaatgcgagcgggcctgcatcggggtcggatccgttttccgtcggaaaacggctctgacccctccgcgatttcgagggacccggggtcagagccctttccggggcggaaagggatccgaccccggtcatcagagtgcgagcgggcctggatcggggtcagatccgttttccgtcggaaaacggctctgacccgtagcgatttcgagagggccgggatcagagccccgtccagcggaaagggatccgaccccgggcatcccaccccgttcagtacgggctggtacactagccgcgccggttcgccggtacacaaacgtcttcagggcggggtgcaattccccaccggcggtaggtgcgcaagcacgagcccgcgagcgccccggcccacggccgggggtcagcagatccggtccaatgccggagccgacggtcatagtccggatgaaagaagacggtgccacagggccttcgcggccctgcgcccgcctgtttgccttgcggcgtttttcgctcacttttcgcggagaacgttacttgtttactggaatcatcgaaggcgtcggccgtctggccgcacgcgaatccatcggcggcgatgtccgcttcaccttccacgtcgggaatctgccgttcgaccacgtgcagatgggcgagagcatcgccatcaacggcgtctgcctcaccgtcatcgcgttcgacgccagcagcttccaggccgatgcctccaccgagaccctgggcctgaccacgctgggccagttgggcgaaggggcggtcatcaacctggagcgcgccatgcgcccgaccgaccgcctgggcggccatctggtcagcggccacgtcgacggcctcggccaggtgctgtccatccatgacgacgcgcgggcccagcgctggcgtttcgccgcgccggcctcgctgcgccgctatatcgccaagaagggctcgatctgcgttgacggcgtcagcctcaccgtcaacgaagtggacgacgacggttttgaagtcgccctgatcccgcacaccgtggcgaacaccgccttctccgccaccggcgtgggcagcgcggtcaatctggaaatcgatctggtggcccgttacgtcgagcgattgatgggtgtgccgagcaacggtcagcacccacagggagacgcagcatgaacttcgccccgattccggaaatcctggaagacatccgcctgggccgcatggtggtcatcgtcgatgatgaagaccgcgagaacgaaggcgacctgatcatggccgccgagctggtcaagccgtcggacatcaacttcatggtcacccacggccgcggcctggtgtgcctgccgctgacccgcagccgcgccgccgacctcggcctggcgccgatggtgcaggccaataccgcccagttccagaccaacttcacggtcagcatcgaggccgccgagggcgtcaccaccggcatttcggcgcatgaccgcgcgcataccatccgcaccgcggtaaagcccaatgccaagccgtcggacctgcaccagccgggccacatcttcccgctgatcgcccagccgggcggcgtgctgacccgcgccggccacaccgaagccggcgtcgacctggccatgctcgccgggctggaaccggccggcgtgctggtggaaatcctgaacccggatggcagcatggcgcgccgcccggagcttgaagtgttcgcccgcgagcacggcctgaagatgggctccatcgccgatctgatcgcctaccgcctggccaccgaaaagaccgtcgagcgcgtggacgagcgcgagatcgacaccgaattcggtccgttcaagctggtgacctaccgtgaccgcatcgcccacgacctgcacttcgcgctggttcgtggcacgccggatgcggacaccccgaccctggtgcgcgtgcaggtggaaaacccgctggccgacctgctgcactggcgccgcgacgacttcggcgtggcggccaccgatgccctgcgcgcgatcgatgccgagggcgctggcgtgatggtggtgctgtcggccccgcgcgatggcgaagccctgctggcccgcctgcgccagcagccggcgccggtggtgccgggcaaggacaaggatgtgggccagtggcgccgcaacggtgccggtgcacagatcctgtccgacctgggcctgggcaagctgcgggtgctgggcaccccgcgccgccaggttggcctggccggttacggcctggaagtggtggagacggtcaccctgtaatgggggattgccggccagcggccggcactaccggtgggtgccggccccatgccaccggtgggtgccgaccgttggtcggcacaccctgcgggcccccgccagccacggccggggcccatccacgctagaattacccccttatcgagtccccaagccgcatatgagccactacgaaggcgatcttcgcactcccgagtcggcgcgcttcgccatcctggccagccgctggaacgcccgcatcaccgacgcgctggtcgcaggcgcgcgcctgagcctggccggcaacggcatcaccgaagccaacatcgacgtgatccgcgtgccgggtgcctgggaactgccgctggtggccgcgcgcctggccgccgcccatgaacacgccgccatcctcaccctgggctgcgtgatccgtggcgacacccgccactacgaacacgtggccgaccgctgcgccgaaggcctgatgcgcgtgcagctggatttcggcgtgccggtgctgaacggcgtgctggcggtggaacgcgttgaagacgccgaggcccgcgcaggcggcagccacggcaacaagggcgaggaagtcgcactcgccgcactggaaatggtcaatctgctggagcaactgccatgaacaagaacacccagggcaagccctccggtaaacccgtccgccgcgatggcgtcgatccggtgctgcgctcgcgcgcccgccgtcgtgccgtgcaggccatctacgcctggcagatctcgggcggtaacgcacagtcgctgatcgcccagttcgcccacgagcaggcccgtgaaatcgctgacctggcgtacttcgaggcgctgctgcacggcgtgctcgacaaccgtcgtgacatcgacgaagcgctcggcccgtacctggaccgtggcatcgaggaagtggacgcgatcgaacgcgcggtgctgcgcctggccgcctacgagctgcgctaccgcctggacgtgccataccgcgtggtgatcaacgaagcgatcgaatcggccaagcgcttcggttccgaacacggccacacctacgtcaacggcgtgctggatcgtgccgccgtggaatggcgcaaggtcgaatcgggtcactgacccgatttctgtagagccgagccatgctcggctcaccgtgcagcgcacggttgcgttcggcaatgcggcgcgtgatcgaactgcagccgagcatggctcggctctacaaaaaagcagaacgccccatgtccctggccgaattcgccctcatcgaccgcatccgcgcccgcaccctcgagcgcgacgacatcctgctcggcatcggtgacgacgccgcgctgctgcagccgcgtgccaacgagcaactggtggtcaccgccgatacgctcaacagcggcgtgcacttcccggttgagacgcctgccttcgacatcggctggaagaccctggcggtcaacctgtcggacctggccgcgatgggcgcgcgcccggcgtggtgcacgctggcactgtcactgccggaagcgtctgaagactggatcgaggcctttgccgatggcttcttcgccctggccgaccagcacgacatcgcgctgatcggtggcgacaccacgcgcggtccgctgtcgctgtcggtgaccgcgatgggccaggtcgggcgtggccaggccctgcggcgcgaccgcgcacaggcaggcgatgacatctggatcagtggcacgctgggcgatgccgccggcgcgctgcgcctgtggcaacaaggtgcgttgagcatcgccaccgccacgctgctggccgactacgaaagcctgcgcctgcgcctgctgcggccgacgccgcgcgtgaccctgggcctgcgcctgcgggccttcgcgcacgcggcggtggatgtgtccgacggcctgctggccgacctcggtcatatctccacgcgtagcaacgtggccgcgcatgtggacgccgattcgctgccgatctcgcacgcgctgcgtgagctgctcggccgcgacactgcgcgcgactgcgcactgcgcgggggcgacgactacgaactgtgcttcaccgccgccgccgaccagcgcgacgcactgcactacctcgccgaatcgctggacgtgccgctcacccgcatcggtcggattgccgaagggcagggcgtgcatgtggatggcgaagccgccgacggcggttaccagcacttcgcgtagccgcagcggtactgccccgctgggtgccaagcttcggggtggggtcagatcgatgttgctctggtaggtgccaaccttggttggcacggatgtgtcagccgcccgtgccaacaccgtgtcgaccaaggtcgacacctacccaggcgggaatacctcggtgttgctctggtaggtgccaaccttggttggcacgaatgtgtcagccgcccgtgccaacagcgtgtcgaccaaggtcgacacctacccaggcgggaacacctcgatgttgctctggcaggtgccaaccttggttggcacgaatgtgtcagccgcccgtgccaacagcgtgtcgaccaaggtcgacacctacccaggcgggaatacctcggtgttgctctggtaggtgccaaccttggttggcacggatgtgtcagccgcgcgtgccaacaccgtgtcgaccaaggtcgacacccaccaacgggggcgggttacacgtgcggaaccgctgtatcgaagcggttgttgcccggcgtgccgggtagcagcaggaacaccagcaccaccaagcccacaatcggcaccagcatcagcaggtaccaccagccggaacggtcggtgtcatgcaggcggcgcacggtcactgcaatcatcggcacgatgatcgccagccacaccaacgcgcccacgcccgtcgatatcagtgccagcgtgcttgaaccggtgtagccagcaatgaagcccagcacattcgacggtatcaacacgatcacgacgaacaactggaaccaccagaactcaccgcggctggcgcgcccattgaactgtgcatagcggacaagcggaatcatcatcttgtgcatccgggcactccctgaaaagaagtgcgcactattggtgctcctgtgatgatgagccatcggaatcgttgcaattgcgtgcagcgtgcaactgaactgagcgcttccccgcacttctcgtcgttggatgcttacaccgcccgcaactgcacatccacatactcggccagcccacggcaggccagcaacagcccttcgcgcgcgccgtcacccatctgctggtcgatatccccgtccacgcggacgcgttcagtggcgtgcagcagttccagcaggaaactcagccccgcattggcgcggtcgatgcgcgccaaggccaaacactgtccgggtgtgcggttgctgccgggccacggctggccatcggcggcatcgccctggcggatgtactgcaggcaggcctgcagggtgatggcgccagggctgttaccggtctgcagcgcaacgaaggtgtcttccagcgtgcgggccaggtcatcgggcaggcgcgtggcggcctcgcccagggtggcgaacaggtgcgggtaaggggaagcggtcatggcggcgtccttgtgcaagcggcaaggggccaccctgcttaacagcgagggtggcggacggtgcgtggttccaataccggtggctaacgtcgtcaaacgccggcgggcacgaggcccccacgcaccgcccgccataggtgcgcggacagaatgcctgccgacgccacccaacaaggaaagggcgacgccggcaggcaagcgtaaacgacattaaccgaacgggattggaagcccgtgccacccgttgtcggtggcgctacatgatttgcatgaagcgccagtgccgccaatgagaattgttggaaagttcgaaagcgttgcaatcgtgcggcgcacgccacagcgtggcaatcgcgacattcgtgtagagccgagccgacgctcggctcatcacaatctcatcgagaagcagccgagcatggctcggctctacagaaagtagaacgcgcttctacctcaccacttgtacgacatgctcagattggccgtcgcttcgcggtacccatggtcaccgcgcatcacgccgaagccaccccacgcactcagcccggaacggaagtccacgcgcgcaccggcattcaactcgtagcggttgcgcggcacgctggccttcagcgcttcatcatcgaacgccatgccgttgctggcgccatcgcggtaccagttggccaccacatacgggctgaccgacgcgccggcggcactgcggccttcgccctgcaggcgcaggcccacgcggccggacagaccgctgtcgcccaggctgcgcaccaccgtgccgttggtttcctcgtggcggtcggtgttggcgtcggtgtagaccagctgcagttccggctgcaggctcagcgcggtgctgccgatctggccgatgccgaagcggtagccggcttccagcgagctctgccagatgtccgagtcgtagcgttcctcggccaggccttcgccctgcacgcggttgcggaactggccgcgctgcacactggcatccacatacagtgcatcgttgctccagttgccgtacacgcccagcgcgccgccgttgaccttgccgcgtgcgctgtagccggtcagctgcgaacgcgaggtggcatcggacctggccagcgtgcccatcaggcccacgcggccctggccgttgtcgaacacgccgatgtctgcacccagctgcaggcgcgagcggtccacgcgcaggaccagctggtcttccacagccgacagcttgctctgcgtggcatccacgcgggcccagccgcgcacgccatcaacggcggcggtgctgccgccctgacggtcgcgccagccgtggcgcagcagctggctcatcgcgaactggttggccaggtaggcgccagcctccgggcgcagcactggcgtggggtcgatcggatcgatcgggtccaccggatcgaccggatcgaccggatcgaccggcttacactccggcagcgtcgggtcgatcacacacggatccggcgccccggcaagttccgagcgcaggtaccagccgccgttggtcgcctccttgaacaggaagtactcgtactgcccgcccaccgcgcggccctgcaggtcgaactgcgcattggacgcaccgcccacgcggatcagctcgatgcccttgtcggtcttcgcgcccgcgccaccggcattgaacacgcgcacgttggcttggccgttggcatcgcccctgatgatgagcttgtcggtggccgagctgtcgtcacccagctgggtgttgaacagcagggtgccgccggcgccgtcgaaggtatccacggtgagcgtgttgaacgtgctgccattgcccagcgccaccttgccggcgctgcccagcgccaggtggccgacgttgctgtcgccggtcatcagccaggtgctgtcgctgtcgatgctggccgaggtgacgctgaggaagcggccgtcgatctgtgccttgttacgcagggttacgttgatcgtgccgttggcaaccgttgccgtatcgagcctcacatcaccgatcagccgcgcgtcgtccactgtaaagctgacacgactgtcggcggcgacagggttgccggtccacgaactcatcagcagcagattcccgtcgcctgcgacaagttgtgacccgttcgcgacggtgatctggtactcggcatcccgcgcgcgcggtgcgacgcggattgcagcgccgcgacgggactggagcacggagtggtcaacacgaagttcgatcgggggctggccggccgctgagggcgccagcagtgcggccatgttgtcggcgtcgatgcgggagccttccagatggatcgtgccccccatcagacgtacgcccaagccgctgttgatgtcacttgtaccgggcgcatcctgggcacggatggtgctgttgcgcaccgttgcgaacgcgttctgtgggaaggaagccccggcaggagcgaggtcgatgcccacgctggcaatgccgggatgcacgcccgctcccgccgccacggagatctggctgtcttcgatcaaggcggtgctgttgtcgacaagatggatgctaccgttgaattgcgtcgatcgagccgccagtgccgaggcgccggagaggcgcacagcggggcccgccgtcgtcgcatccacactagtgttggacagcaccacggtcgagtcctcagcggtcagattgcgggttgcgccgtcattcacggtcagcagcgagccgttcttcaacgtccacgcttcgaccggatcgccagcaccgacctccgcagtctggccgtcgagatcgccggcaagtgcgatgccggcgggaagggacgccagcgccagcaccaggctgcggaacagcgggcgcggcgtcagaggatgggatgcggtggcggtgcgcttcatgggggaatccttgtgtcggagaagggggagagacgcgacacgacgcaaccgcattcagacgaagtgccgtatatccttcatctctgtgaggatggtgtgaagagtgggcaattgcgaagtcaagtgtctctactggcgccagtctctgtgcgcagcccggccgaacccatgcaaaaagttgtaaagcccactgaacaccggtagcgccttcagctttcagccagcactgcgacaccctgtcgcaggtgggttgcaagtgattcgatggaggcagtgaaaggagatgacgagcatggcgcctcctttcaggagcaaccccatgcatacacccaccccacgccaccatgcgctgccagctgccctagccattgcactgcttgccagcattcccgcctcggcccagcagatcgtggcggacggcgacgaccagatgcccgccgaaggcgattaccacaccactgagccggtgctgccgggcgacccgtcgggacatgccttctacgcaatcaacggcggccgcattcttccgacagggccggtcaatctctctaccgaaggacgcggagcgcacgctgcgcacgccgaaggtaccggcagcctgatctcgttgcagggcgcatcggtgagcaccactggcatctctgcagcaggcgcgtcagttgccgcaggcgcccgactggaggccgccgatgtagtgatcgagacacgcggcaacggcgctcacggggtacaggtgcagggcgcggatgccgtgctgagaaacgtgcaggtccgcagcaccggcggcgatgcgcttcggttgatgggaggcacgctgcaggttcagggcgctcagttgcaggtgaaccgatacggtacttacggtctgtatgcgaatgcgggcacagcaacgctggatggggtccacatcgacatggcgggtgacgcgggcaatggtgtcctggcgaccggcacggccgaggtcgtcctgcaggacgcgagcattggacgcgtgggctattcgggtgtggccgcaacggcgcatcgcggcacgcgcctggtgatgaagggtgtggacatcgacatgcgcggtgacgccgccgtcggtctggcgatgggaggcagcgtaaacgtttccgacagccgcatcagcgtgcagggcgcccatggtcgcgccgtcgatcagtcaggtggtgcgctggacgtgcagagcagcgagctgtccggcaatacgggactgaggctgatggacaatggcagcgtgaacctgcgtgacagcagtgtccgcagcgagctggtcgcattggatatcaatggccgaggcaacgtcgtgacagtggaacgcagctcgcttgcaacgtctgcaggtactgccatctggatgccgaacgattccacgctggtgctgagtgagtcttcagtggtggcccagggagacggtgggctcggccttgatgcacgaggcggcagcgcgcagcttttcagtaccaacctgcgtacaggggggcgttctgcccatggtctgtatgcgcagggcggcgcggggcggccgcccgtgatcgaggcggtcgatacccaggtgctgaccgaaggagatgggtctgctgcggcgattgcgcgcaccggcgggaccgtcacgctggtcgacagccgcttgcagaccgtcggccgatcctcgcacggtgtcattgccggtggtgctgggcagatcgctttgaacaacacccatgtacgcaccgaaggcgagggcgcgtgggcggcggtgatcagtgacaacggtcgcatgcgtatcgacggcggctcgctggtgagcgtccagcatggtggcgtatggctgcgtagcagccgcgacccgggccttaccctgtccaatggtgcggtggtatcgggtggcaatggcatcgccttggcactggatgccgcagtggccgggcgcttcgatgtggtgctggagggccgctcgcggatggacggtgacatcgccatcaccccggaggacgaggacgctgggctgccgtcacagtcggacgtgcatgtacggctggccgatggttcgctctggcagggttcgtcggatctggtgcagacgatggcgatcgagaacggcagccagtggacgctgaccggtgatgccacggtgggcgagttgcaggtactcaacagtggcgtcgccttgtccgacggcagcggccgtttcaatacgctcaccgtggacggcgacctgcacagcgcaggggcgacgttcctgttccagggcacgctggccggcgatgacagcgcgatggaccgcctgcacgtgcgcggcgacagctccggcgacgcgctgatcgcggtgaagaacatcggtggcgtaggcgcacctacggtggatggcatcccgctgatcgagatcgacggtgcatcgctggcgagttacacgctgagcggccgcgcggtgggcggatcgtacgagtacttcctgttccagggcggcctggccgatccttccgatggcaactggtatctgcgttcgcagtggttcgatatctgccaggacaacccggccgcaccggggtgcgtggtcgatccgggcccggatccggatccggatccaaccgatccgactgatccgactgatccgactgatccgactgatccgatcctgccgccaccggtgctgcgcccggaagcgggggcctacctggccaaccagtcggcggcgatcaacctgttcgcgcaccgcatgcacgagcgcaatggcgcgcgttcgatgggcgacgagcgccagggctgggcacgcgtgggtcggcagcaggcggatttcagcgcggtcggcggccagctgtcgattgatggcaacacctcgatgttgcagatcggcactgacctgctgcagcgtggcaacgcggttgccggtgtgatgctgggcagcggccgcgccgacagcagcgtagtgtccgatctgaccggttacagcgccaagggccgggtgcgtggcagcgccgtgggtgggtacggcacctggatgcaggaagcggacggcacgcggggcgcgtatgtggatgcagccctgcagtacggccgcttcgacaaccgggtgcagggcatcggcctggcgccggagcactacgactcgcgcatggccactgcgtcactggagtccggctacacattcaatgtgtggcaggacaccgccagcgcactgtatgtgcagccacaactgcagctgagccatgtcgatttccgcgccgatcgccacgtggagagcaacggtacggtggtcgaccatgccgacgccggtggccttagcgggcgcctgggcgtgcgtgtgttcggccatggcacggccgccggcaacaccgtgcagccgtacctgggcgtgaactggctgcgtggcagcggcaccagtacgttgcagttcaacggcgacacgctgggtgcggacgtgccgcgcaaccgctatgaagtgcaggccggtgccgagctgaggctgggccagcgttggggtgcgtggggtggcatgagcgtgcagcgcggcgatcatggctaccgcaacgtaggcggccagctgggcctgcgcatggcctggtaagcgcgcctgcggcggggtcggatcccattgccaaggcaatgggctctgaccccccagttgctgctgtggagccgagcctatgctcggctcactgcgatctggacgaagggcagccgagcatggctcggctctacaaccgcgccgatccgggactggacctgaacgttgtccacgtctgtcgcgattgtccattgaatgactgcgcaaacggtggcgatgctgccgccctgtcttctgccggttgcccgcgtgtcctctcccgaacgttcccacaacgccgccatcgatggcctgcgtgcactggcggtgctggccgtcgtccttttccacaccaacgcgacgtggctgcccggcggcttcaccggtgtggacctgttcttcgtggtatccggcttcgtgatcagccagtcgctggcctcgcgcgcccaagcatcgctgggtgcgatgctgctcgatttctaccggcgtcgcgtgctgcgcctgttgccggcgctgctggtgatgctgatggcgaccttcgtgctgtcagcgttgttcattccccgcgcgtggcgcaatgagcagttcgaccagaccggctgggccgcgttggtcggcttgagcaacatcgtgctggccggccagcaggacgattacttctcgcccggcgctgaactcaatccgttcctgcatacctggacgctgggtgtggaagagcagttctacctggtcttcccgctgttgttcttcgtgtggctgcgcgggcgtgagcgctggccgggggcgcgttggctgttgccggcgctcaccatgctgtcgctggcgtgggcgggctggcaggcgcgatcggcgccggcgtcggcgttctatctgctaccggcgcggttctgggagctggccgcaggtgcgctgctctaccagtggatgcataaacgtacgccacgccagggcagcgacgcggctgccgtggcgggcctggcgctgctggccgcgggtgtgctgatcgccccgcagttggcgatgccggtgccgggcgtgctggcgaccgtggccggtaccctgctgctgttggcgggcgtgtcgacagcggggacatcgcgcatcgcccgtgcgctgggctgcgcaccgctggcctacctgggtcggctgtcctattcgctgtacctgtggcattggccgctgctggtactgctgcgctggacctatggcctgcatggcgtcgcgctgtggctgtatccggtgctgctgctggcggtgtcggccgcgtcctaccacttcatcgagcgcccgctgcgcagtgcggcgccgctgctgcggctggcaccggccaaggtgctggcgatggcgtttccgctggtggcgctgtgcggtgccggcgcctgggccacggtcgagtaccacgagcaggtctcgctcagcgtcacccgcaacggctacgcatggcaggcgcgtcgctacccggcgtggcgcccgctggaaccggtgagtgcgccggcgcttgaagggcggcgcctgttcgtggccggcgactcgcatgcggcggcgtatcgcaccatgaccagcatggtcgcgcggcagaccggcatggaggtgcgccagcaggatcgcggcggctgcagcttcgtcaacctgctgcgggccagcccggccgactgccaggacttcattgaagacacgctgtcgaccatcgaacgcgaggcgcgcccgggtgacatcgtgctgctggcggccttgcgcatgccggaactgcgtgggttcgactggcagcggcaggatgcacagcagatctatcaacagctgctggccgagcgcacgcccgtgcatgcacaggctgcacgcgacgaagccgaacgcgtgctggggcgtttgcagaagctgggcgtacaggtggtgatcgacgcaccgctgccgctgttcaaggccggtgcgtaccgctgttcagactggttcaaccgccgcaatccggcgtgtgccggcggtctgagcatgccgcgtgcggatctggaaatgctgcgggcgccgcagatggcactgctggatgacctggcggcacgttacccgtcaatgaccgtgtgggatccgctgccgctgctgtgtgggccgcaggcctgttcggcggtggaagacggcgaaccattgttcttcgacaatgatcacctgagcgggcatggcaaccgcgtgctgctgcccagcttccggcagaccctgatcgatatcgcagccgacaagacggtgtagagccgagcccacgctcggcttgcgcgcacagcgcgggcgtcatcgcgatctggtcgaagagcagccgagcatggctcggctctacaggagcacgaaggtgaacgacacgtcgttgtagagccgagcccacgctcggcttgcgcgtacagcgcgggcgtcatcgcgatctggtcgaagagcagccgagcatggctcggctctacaggagcgcgaaggtgaacgacacgtcgttgtagagccgagcccacgctcggcttgcgcgcacagcgcgggcgtcatcgcgatctggtcgaagagcagccgagcatggctcggctctacaggagcgcaaaggtgaacgacacgttgttgtagagccgagcccacgctcggcttgcgcgcacagcgcgggcgtcacgcgatctggtcgaagagcagccgagcatggctcggctctacaggagcgcgaaggtgaacgacacgtcgttgtagagccgagcccacgctcggcttgcgcacacagcgcgggcgtcatcgcgatctggtcgaagaggagccgagcatggctcggctctacaggagcgcgaaggtgaacgacacgtcgttgtagagccgagcccacgctcggcttgcgcacacagcgcgggcgtcatcgcgatctggtcgaagagcagccgagcatggctcggctctacaggagcgcgcaggagtgtgcgcagtctatgccggcggcagcaccttgcccgggttgaggatgccgtccgggtccagcgcggccttgatcgcgcgcatcgttgccagcgtttccggggtgaaggcctgcgccatgaaatcgcgcttggccaggccgatgccgtgttcgcccgacaacgtgccgcccaatgccagcgtcagctcgaagatccttggcagcgcggcatgcgcgcgcgtgttctcgtcggcatcgtccgggtggtagaggatgttgacgtgcaggttgccgttgccggcatggccgaaggtgacgatggtcagcgtgtagtcacgtgccagcgcctgcacgccggccaccagctccggaatgcgcgacaccgggaccactacatcttcattgatcttgcccggcgccacactgcgcagcgcaggcgacagcgccttgcgcgccgcccacagctggtcgcgtgcgcggccttccatcgccacgtccagttcgatcatgccgtcgccttcggcggcgctggccaaggcctgcagcagatagggcagggtgtcgtggtcaccatcggcctcgaccagcagcatcgcaccggcctctggcacgtcagcaccattgagccgcagcagctccaggctgcgcgcgtccatgaattccaggcgggtgggtaccaccggctgcgacatcaaccgcgatacggcggccgcagcagcatcggcatcacggtacagcacgcgcagcccggcctggctgaccggcaacggggtcagcttcagcgtggcttccacgatcagtgccagcgtgccttcgctgcccaccagcagatgggtgaggtcgtagccggtggcgtccttggtgtaggcaccaccgcagcggatcagctcgccggtgccggtcaccgccaccaggcccagcacgttgtcgcggctggtgccgtacttcaccgcgcgcgggccgccggcattgcaagcgaggttgccgccgatgctgcagatctcggcgctggaaggatccggcgcccagaacaggccatgcggggccagtgcctgctgcagggtgccattgagcacgccgggctgcacgaccgcgcagcgatcaccggcgcggatctcgatgatgcggtccatgcgggtgaacgacagcacgatgctgcccggctgcgggacggctgcaccggtcgtgccggtgccggcgccgcgcgcgaccagcgccacgccatgcgcgcgacaggcacgtaccagtgcctgaacctgttcgacgtcggcgggcagcgccacggctgccggacgctggcggcgccatgaattgtcctgcgcgttggcctccagcgcgctgtcatccatgcgccagccctccgcgcccagcaggacggacagttcggcaaccagggcagcaggcagggcaggactcatgacggatctcgagaggcagcaggagcgggttggatcagtttccaggcgacaacggcgccggccagcggcagccacacccagcgcagttcggagagcagggtagccacgccgcgtgcgctgaagaactgtggggcgaagggcgaaacgcggatcggtcgccacggcgcgaagaagcggtgttcgctccacggccaggccagtgcgacgccgaggccgccggtggtcatcgcatccagcagcggatggctggcggcacagacgaagacgaatacagcggcttgtacggtcgatgccaccgttggccctgccttggtaggtgccaaccttggttggcacgaaaccgccgaccaaggtcggcgactaccggggctgtgtggtgccgaccaaggtcggccgctaccaaagaatgcgaacgccgccgccaatgccgccagcacgccggcaaacagcagcgaatggctggcaccgcgatggccgaaggcatccgcatagggaatgtgcagcgcaaaggccagtacatcggcatcgggcagcatcgcggcgatcacgcctgcaaccagcaggcgcggcgggatgcggccacgatcagcggcgcaccacagcgccagcggcacggcggcatgggtgatgatcgaaggcatcagtcacgcaccatggtagtgccggccaggctgcgctctggcgggggccaaccttggttggcacagacgcgccgaccaaggtcggcttctaccaaggcggacagtacacatcagcaatcatccagccggaatgcgtcacgcagccaatgcagctgcggcggttcgccactggcttccaccacgtcgaagcggcagggcgcattggccagcgcggggtggtcctgcaggtacagctgcgcggcatgcgccaggcgccggcatttgcgcgcatcgactgaagcggcaccgccaccgtactccgatcgcgcgcgatagcgcacctccacgaacaccacgatgccggcatcgtccatcaccaggtccagttcaccgccgcgataacgcacgttgcgcgcgcgcggctgcagtccggcctgttgcagatgctgctcggcggcggcttccaccgccgagccacgttggctgcgctcagcgaccaccgacgatcggcatcggccggccgccattgaaggtcgaccatgccggctggcgcaggatgttgccgttgctgtccaggaacagggtgccggtggcaccgtccaggccgccttcgttggacagcttgtccagataggcggtgatcttccaggcgtcggcgccgaacgcgaacaggcggccggccgcaccgcgtgcgctcggcagggtgctggccacctggctggccgagggcaggccggacacgctgcgcacgttccaggcttcattcgggtagacgatgccgtccagggccacgtcttcttccaccttgccgctgccgacggtcagctgcgaggtgccgacgcgggtggcgccaccggcaccggccagcgccagctgcggcgccagcaggcgggcctgcggtgcacgcacggcgaggaacaccgcatcgacctggccggcattgcgcacctgcgcgccgacatcgccaacggcatcgctgacgttgaaggtggccaccacctgcccaccgcgctgtgcgaagcgctgcgcgaaggcggcggcggaacggcggccggtgtcgtcattgctgctgatcaccagtgcgcggttgcgttcgcggccacgcaggtattcggcggcgacgatgccgtcgtcttccggtgccagcgagaaaccggcgctgccggccggcggtgcgtccttgccacggttcagggccagcaccggcacctgcagctgctggcggccgtacacggcgtccacttcgtcgcggcccagcggtccgaccacgaagtcggcaccggaggcgaccgccttgtcataggcggcgagggcaccggccggggtgccggcggtgtcgaagaagttgatgtccgggcggcggcggctttcaccgtagtaggcgctcaacaggccatcgcgcaccggctgcgcggcggtggccaggcggccgctgagcggcagcagcacggccagcttggccggcgggcggtaaccgtcgctcatcgccggcgggcgcttgctggtgtcgaactgggccgcgccatcgcggtcgaacgggcgcggcagcggcaggccgcgcgcgatcagcgcacggccggcgaagttgtacagcgggtcgttggccggcagcgcggcggcacggctgcgcagggtggcgtcgtcgagggtgccgagcaggccggcgatggcggcctggttctcgctgcgcgcgctgccggtcaggccggcatgggcacgggcgcgctcgttggcggcaccgaaggcatcgccggtgccctgcagggcctgggcgcgggccagcagccagcgggtgcgcaggccgaccgcaacgctgtcggcatgatccttcagcagggccagcgcctgcgccggctgcttgtcggccagcgccagctcggcaccggtcagctggtagcgctgcaggctggcgccggacagctggcgggcggtgagctggcccagcaggctgcgcgcgcgggcactgtcaccggccagatgccaggcccaggccgcatcggccagtgcgttgctgcgggcaccgccacgcagcgtggcggccaggccttccagctgcagtgcggcgtcgcgcggcttgccctgttcgatcagcgccagcgcctggccctgggccggcgaatcgggcgtgctggtcaggctggtggtggcacaaccggccagcagcatcagcgacaacgacagggcggagaaccgtgcggcgggcttgttcatgatcgggtccatgcgatgagggcagcggccttggccgggtacacgctacgattctacccttgccccgtgagtaccgctgaaatgagtgtcccaaccctgtacgtcgtcgccaccccgatcggcaacctggccgatctgagcccgcgcgcgcaggaggtgctgcgttcggtggcggccatctgtgccgaggacacccgccgcagtggccagctgctgtcccatttcggcatccagcaaccactggtggccctgcacgaacacaatgaagaggccctggcgcagcgcctggtctcgcgcctgcaggccggcgagtcgctggcgctggtcagcgatgccggtaccccgctggtcagtgaccccgggttccgcctggtgcgtgccgcgcgcgcggcgggcatcaaggtcagcccggtacccggtgcctgtgccgccatcgccgcgctgagcgtggccggcctgcccagcgaccgtttcagtttcgagggcttcctgcctgccaaggccagcggccgccgcgaccgcctgcaggcgctggccggcgaagtgcgcacgatggtgttctacgaatcctcgcaccgcatcgccgaatcgctggccgacatggcggcgatcttcggtggcgaacgcccggcggtgctggcccgcgagctgaccaagctgttcgagaccgtgctcgatggtgacctggcgggcctgctggccaaggtcgaggccgacgacaaccagcgcaagggcgagttcgtggtgatggtgcagggcgcgggtgatgacgagcaagcgcagctggcacatggccgccgcgtctacgcgaagctgagcgagcacctgccaccgtccaccgccgccaaactggccgcggaactgaccggcgcgccgcgcaaggcgttgtacggtagttgatggattgctgcagccacgcatggcgtggcgctactgcagtagcaactgtcttgtcaggggcagccgagggccacctcggcgtcccgcttacgggcgttgaggatcaccagcattttgcgcatgaccgccacgagcgccaccttgctcgctttgcccttggccttcaggccagcgtaaaacgcgcgcagtcttggctcgtaccggatggccgtcagggccgccatgtaaagggcttcgcgtaccactgcgcgcccaccactgatccgccgttggccctgccaggtgccactttcgcggttcatcggggccaaccccaccagcgatgctatggctttgcttcccaagctgcccagttcgggcaactcgcaggccagtgtgctgatcaggatggggccgacgcctttgagcgcgccgatattcttccagccaggctgtccctcaagctgctcggcaatagctttatccagttgcttcaggtcgtcagatagctgggctatatggcgttgcttcatcgcaatcagatccggatcgaccaatcgccgcaagcgctgcatctcactgacccgcatctgcaccagatgcctgcggcattgcgcaaattcagccagacgctgctgccaaggggcaggcggtacgtagcgggtcagcggtaacaaatgggccatctgcgccagcactgtcgcatcgagccgatcggtcttggcggcacggcccgtgccttgggcaaatcgccgtgcacgcgccggattgattcgcaccatcggcaggccggcggcgtgcaatacatccagagcagcacgctcgtagcccccgcttgcctcaagaacgacctgcttgatcggccacgtcttcagccaccgaatcaagcgcacaaagccgcgcttgtcgttgctgaattggcgaaactgctctccatggacggccacatccagcgtggctttgctcacatcgatcccgatcccaaacatgacagaactccgctaggctgacagggtcgagagctctccccgcttgcccagtcttatcagttcgagcgccaactcaaccaactgttcgggcggttcagggagaatccggcgtggggacccaagctacttctcggtcgcaagacctggatccacacggtcgcccacgccgggctctcggcacccaaggtgccagatcggcaagagataagatccacgccatgcgtggatggatgaaccggacgccgcgatcagcacggcaggaaggacctgcgtacgctagaatatgcgctggcggagccggccagacagtcgcgtcatcccttcgggggtgccgaggaaagtccgggctccacagggcaaggtgccaggtaacgcctgggcggcgcaagccgacggaaagtgcaacagaaagataccgcctacgtcttcttcggaaggccggtaagggtgaaatggtgcggtaagagcgcaccgcgagtctggcaacagaccggcacggcaaaccccacctggagcaagaccaaatagggatcctttggcgcggcccgcgttggatccgggtaggttgcttgagcgttgcggtgacgtaacgcctagaggaatgactgtccacgacagaacccggcttatcggccggctccgcctccttcttcttccacgcatggcgtggagctaccgtgattgcggggtcggatccctttccggaggaaagggatccgaccccatgctgtcctcagcccggcgtgcggtactgcccggcggaaatgaactgcgagaagcgctcgcaccacaccaccaccgtggtgtagtcgtccacgtccacgttcgcgggcacatccaccaggaagcggttgaaggtcttcacctcgccgatgcgctgggcctgcgccttgatcttcaggaagtcggccttgttgtcgacgaagtcgcggaccaggtagaccttgtagtccgggcccggtcccatcttgccgtcgaaggcaacctgggtggcgctgacgctgaccttgccttcggcccagtgcaccgcgtcgctgcctttgaggtcgcgacggaaggtggtgcgataggtggcgtcgttcatcgcggcctgcacctgcgtgaccggcgggtcatcgggggcgatcaggatcggcagcagatagatgcccaggccgaagcccaggccgagagcaagcaggtgggtggcgaactggatgagaatgcgacgcatggggcctccttgagggttgtggtcgattgcgcggcgcgatgccgggcgcgaccaccctgggaggtcaggggcgacatttatagacacagtgccgattgcgaaaagggcacagtcggctggctgtgatgctgaaaccgctgtggcgcggacggatcgcggtcgcggctggaagctgaatgacgtttcaggcccgctgcgatgacgactgccgtcgcgtggatcgcgacagcacgctgcgggtagtgccggccgctggccggcaacttcatgctgcatccgaagatccagaggttgccggccagcggccggcactaccccccccgccaagagcatccggccaagggccgtcatgaccgggtcagaaaatgacgtggctctggccgctgggagcgccctgcgggccgaagcggcgttcgtggatctcgccatggccgtcggcgtcgatcagcagcacggtgctggcgcgggtgccgtagtcatcgccacggatgaaggccgggctcagccagcgctcgcgttccaggccgatgccggtgtcgggcaggtcgctgtcggcagggcggtgttcgtcggccagagcattccagagtggggtcaggtccggggtcagatccctttcgctgtgcgaaagggatctgaccccgtcattctgaagccaggcttcaagggccgccatcagccgccgggtcttcggccagggcgcgtccagcgcgccgttggacatgccgtgcacgcccgggccgagggtctgccgttcggcgggatggttgccgaggtactccaggctgtcgctatcggccagcaacagattgaacggggcataggcgccagccacggtcgccaatcggtcgatatgcacagcggccgggtcgcggccgcgcaggaagtcggccaccagcgcgccccgcgacgggccggtctgggccgccagcgggtcgcggacgttggtgaccaccgccatccggcccgaggcgccaaccccggcccagccaccgccggagcgcaggtcgcgcccgccgatgacggacgtctcatcctgccagggggccagcgccgccgtcgggcgggcgtggaactcatcacggttgccggtcatcaccagccgccagcgcgggtggtgcatccagccaagagcgagcaggcacatggcctcattgtgcacggtttgcgcagtccggcgccgtttccggcccgttccggatgaatgcgcggccgatgtttcacgccctctccacgcccctgaacttccgttcaatctcaaaaattgagacggatcagcaacttgtggataagccttgaacaattctctaaaggttgttgcaagccattgatgcggctggcgatttccccgctgaaaagttgttgacaaccctcggcccgctgctaaggtgggcatcagagggaaatccgggtgttttgtgggttttcgtggttcaatgtttcaccgggcgaaggacaaggtgcaggcgtcgtgttccagggcgagacggccatcacagttgacgacaaagggcgcatggcggttcccaccgcttaccgcgacctcgtcgcgcgcgccagcaacaaccgtctcgtgctgacctacaacccgttcgaagccggctgcctgtggctgtatgcagagtcggaatgggagcgggtccgcgacgatgtgatgtccaagcccaacacccagcgcgtcgtgcgcctgttgcagcagaagctggtcggctcggccgcccatctggaactggacggcaacggtcgcatcagcatccccgccagccaccgcggtgcggtgggcattgagaagaaggcggtattgctcggtatgggcgacaagttcgaattgtggagcgagcaggcgcatcgggccctgatccagcagacgttgtctgacgaggatctgggtgatgggttgctcgacctgaagttgtgagccggggtgcccggatgcgcccagaagcgcaggccggtcaccttccggtgtcgcagtcgccggcggtgcacctgccggtcctgtacacccaggtccttgaaggcctgagggtgatcgaaaacggacgttatctggatggcacgttcggtcgtggcggtcatgcacgtggcgtgctcacccagctcggtcccgaggggcgcctgctggtcatggacaaggatccggaagccatcgccgttgccgagcgcgatttcgcgccggacccgcgcgtgtccattttccggggcagcttcgcccagctgctgcagtgggacgcgacggccgaaggcctggacggcgtgctgttcgacctcggcgtgtcgtcgccgcagctggacgtggccgaacgtggcttcagcttcggcaaggacggcccgctggacatgcgcatggatccggacagcggtgaaagcgccgcgcagtggatcaaccgcgtcgaagagcgcgagatcgctgatgtgctgtggacctacggcgaagagcgccagagccggcgcatcgcccgcgccatcgtggcccgccgcgagaagcagccgttctcccgcaccgccgaactggccgagctgatcgcctcggtgatgccgcgtgggaaggacaagattcacccggccacgcgcagcttccaggccatccgcatccacatcaaccgcgagctggccgatctggaagccgggctcgatgcggcggtggaacggctcaagcccggtggccgcctggcggtgatcagcttccactcgctggaagaccgcatcgtcaagcagtacatgaaccgcctggccaaggcgccgccggccaaccgccggctgcccgaggcggttgcgttcgtgccgacgctggacctgatcggcggcgccatcaaggccaccgacgaagagctggccgccaacccgcgtgcccgcagcgccgtgctgcgcgtggcacagaagcgggggggcgatgcatgagccggctgctgctgatcatcctgctggcctgcaccgtcgcctcggcgatcggcgtggtgttcgtgcgccaccgccaccggcagaccttcatcgagctgtcgcgtgccgagcgcaagcgcgatgacatcaaccttgagttcggccgcctgcagctggaacaggccaccctggccgaagccaaccgcgtggaccgcattgcccgcgagaagctgggcatgaagttccccgaggccgctgacatcgtggtggtgcgcccatgagcaagaccggccgcaaccgcccgcgcaacgccttcaacctgcgccagcgcctgcgctgggtcgcgctggcgcttggcctgtgctcggtgtcgctggtgggtcgcgcggcctacgtgcagatcatcaacagcgatttctaccagcgccagggcgaggcccgctacctgcgcgagctaccgatcaagacctcgcgcggcatgatcaccgaccgcaacggcgagccgctggcggtgtccaccccggtcgcctcgatctgggtcaacccgcaggacctgctgcgttcgcccgagcgcatcccggagctggcccaggcggtcggcatgtcggtggatgagctgagcagccgcctgtcgcagaagtcggacaaggaattcatgtacctgcgccgccggatcaatccggacgaggcagagaaggtggtcgcgctgaagattccgggcgtggccgcgcagcgcgagttccgccgcttctacccacagggcgaagcgatggcgcacgtgctgggcttcaccaacatcgacgaccgcggccaggaaggcctggagctggcgttcgacgaatggctgcgcggcaaggccggtgccaagcgggtgatccgcaaccgcaagggcgagaccgtcgaaagcgatctgctgcgcgccgccgagccgggcaaggacctgaccctcagcatcgaccgccgcatccagtacctggccttcaaggaactgcgcaacgcgctggtggccaacaaggcggccggtggttcgatggtgatcatggacgtgaccaccggcgagatcctggccatggtcaacctgccgacctacaacccgaactcgctgaccggcgcgatccccgatacgcgccgcaaccgcgcggtgaccgacctggtcgagccgggttcgacgatgaagccgctgaccatcgccaccgcgctgcaggccggtgcggtgaccaaggacaccatcatcgacaccaacccgggctacatgaccctgggccgcttcaccatccgcgacgtgccgcgcaacaacggtgtgctcaacgtgaccggcgtgatcactcgcagttcgaacgtgggtgcggccaaggttgcggcgaagatgccggaccagaccttctacgacggcgtgcgccgcttcggctatggctcggcgccgcacagcggtttcccgggtgaatcggccggcgtggtgatgcgtccggcgcgctggtcgggtaccaccaagaccaccatgtcctatggctatggcctgtcggtcacgccgctgcagattgccaccgcgtactcggcgctggccaacggcgggcgcctgatcgcgccgaccttcgtcaagggccagcgcaatgaaggccagcagatcatcgacgagaacgtcgcccggcaggtggtggcgatgatggaaacggtggtcacccagggcggcgccaagcaggcggcggtgctgggttaccgcgtggccggcaagaccggcaccgcgcgcaaggccggcccgggcggttatgagcgcggccattacaacgcgctgttcgccggcgtggtgccggccaccaacccgcgtttcgccaccgtcatcgtcatcaacgacccgcaggccggcaagttctacggcggcctggtgtcggcgccggtctaccacaacgtgatggaaggcaccctgcgcctgatggacgtgccgctggacgacctgcagtcgtggctggccgcacagcagtcgggcaaggtcggccattcggcctcgatcctgcctgcgccgccggccgagaccgcgctgccggtcgatgccgccgctgaattcgacgctgcgctgccgagcgcgcaagcccagacgccgcccgctacgggaggcacgcaatgagtccttcgatgttgctttcgcagttgcttccggacgtggccctggcgggtcacgatcccgttctgaccggcctggtgctggacagccgtgccgtgcgccccggcaatgccttcgtcgccatcgccggtttcggcgcgcatggcctgggctttgtcgagcaggcgcgcgctgccggtgccagtgccatcctgttcgaaccgccggcaccggccgatctgccggccccggctgatgcgatcgccgtgccgggcctgcgcgcgcgcatgggcgcgatggccgaccagttctatggcgcgccatcgcgggcgatggcgatggtcggcgtgaccggcaccaacggcaagacctccaccgtgcagctgctggcccaggcctggcatctgctcggaacgcccagtggcagtatcggcacgctgggtgccggactttatggtgcggtcgagccgaccggcttcaccacgccgctggtgctgcagatgcatgcgcttctggcgcagctgcgcgacgccggcgcgcgcgcggtggcgatggaagtcagctcgcatgcgctggaccagggccgcgtggacgccgtgcactacgacgtggcggtgttcaccaacctcacccgcgaccatctggactaccacggcgacatggccagctacggcgcggccaaggcgcggctgttccatcgcccgggcctgaaggccgcggtgatcaatctggacgatgccttcggccggcagctgttcgcgggcctgccagccggcgtgcaggcgatcgggctgagctcgcgtggtgccactgacgccagcgtgcgcgccgaggcgctgcagctggacggtcgtggcatcgcctttgaactggtcatcgacggccagcgcgcggcggtgcagtcgccgctgctgggccgcttcaacgtggacaacctgctggccgtggccggtagcctgcacgcgcagggccagccgctgccgcgtattgccgaggtgctgtcggcgctgcagccgatccgtggccgcatgaaccgcctgggcggtgaagacggcctgccgacggtggtggtcgactacgcgcacaccccggatgcgctggaacaggcgctggacagcctccacgggcacctgcagggcacgctgttctgcgtgttcggctgcggcggcgagcgcgacaccggcaagcgcccgcagatggcggcgattgccgagcgcctggccaaccaagtcatcgtcaccgacgacaacccgcgtggcgaggatggcgacgtgatcgtggccgacatcctggccggcttccagaacgccgatgccgtgaccgtgcagcgcagccgcgcgcgtgcgatcggcctggcggtgaagcgtgccggtgcaggcgacatcatcctgatcgccggcaagggccacgagccgtaccaggaagtgaatggcgtgcgccatgacttcgacgacaccgaagtggccgccgccgcactggcggccaaggccggtgtgctcagcgcgcaggccggggagggtgccgcatgaagcgcaccctgctttcgctgatcgcacactgggccggtggcgagatccacggcgacgacgtggccatcgatgcggtcagcaatgacacccgcaatctcggtccgggcagtctgtatgtggcgctgcgcggcgagcggttcgacggccatgacttcgcggccgacgcgcaggcgcgcggtgccagtgcgctgctggtcgagcgcctgctgccggtcgaactgccgcaggtgctggtggccgacagcgaactggcgctggcgaagatcgccacaggcatgcagcgtgaccgtggcaccgaggtgttcgcgatcaccggcagcaatggcaagaccagcgtgaagagcctgctgctgtcgatcctgcagcaggtggcccagcacgcgcacaaggtggtctacgccaacccgggcaaccgcaacaacgagatcggcctgccgctggcggtgatcgatgcgccggaagatgccgactacgccgtctacgagatgggcgccggcaagccgggcgacatcgcctacctgaccgagatcgcccgcccgcgttatgcgctggtcaacaacatcgccccggcgcacctggaacgtatgggcagcctgctcggcgtggcggtgaccaagggcgcgatctacgccgcgctgccggccgatggcgtggcggtgatcaacgccgacgatgcctatggccgctggttcgaacagcatttcatcagcaccccggcgcgttgccgcgtgctgcgctatggcctggaacactcggcggacgtgaccgcgcgcgatatccgcgccggtgcgcagggcagccagttcactctggtcgcaccggccggcgaagcccgcgtggtgctgggcctgccgggtcgccacaacgtcagcaatgcgctggccgccgccagcctggcgctggccgccggtgtcggtctggcgctgattgccgccggcctggccgaagcgcagccggtgccgggtcgccagatcgcccatcagctgcgcaatggcgcggtgctggtggatgacagctacaacgccaaccccgggtcgctggccgcggccatcgatgccctggccgcggcgccggaagagggctggctggtgctgggcgacatgcgcgagctgggcccggacgcggaagcgctgcatgcgcaggccggcctccgcgcacgtgctgccggcctgaagcgcctgtatgcactgggcccgctcagcgccgctgccgcctccgccttcggcgaaggcggccgccatttcgccacccacgacgcgctgtcgcaggcgctgaaggacgagctgcacgccggcgtgcgctgcctggtcaagggttcccgtggcagcgccatggacacgattgtcaaagcgctgctggcgcaaggagaggaatccccgcatgttgtatgaactggctcgatggttgcagcagttggagagcctgttcgggctgttcaactaccagacgttccgcgccatccttgccgcgctgacggccctgttcctgtcgctgtggctgggcccggcgatgatccgcaagcttgcccagttcaagggcggccagccgatccgcaaggacggtccgcagacccatttctccaaggccggcacgccgaccatgggcggttcgctgatcctgctcaccatcaccctgtcggtgctgatgtgggccgacctgcgcaaccgctacgtgtggctggtgctggcggtgatgctgtgcttcggcgccatcggctggtatgacgactggatcaagatcgtccgccgtgacccgaacggcctgaagtcgcgctggaagtacctgctgcagtcgatcttcggcctggccgcgggcctgttcctgttctacacggccgacgtgccggcggcgctgacgttctacatcccgatgttcaagtcggtcgcgctgccgctggccggcatcggcttcgtggccatcgcctacttctggatcgtcggtttctccaacgcggtgaacctgaccgacggcctggacggcctggcgatcatgcccaccgtgctggtggcctgcgcgctgggcgtgttcgcctatgcctcgggcaacgtggtgttcgccaactacctgcagatcccgcagatcccgggcgccggcgagctggtcatcatctgtgcggccatcgccggcgcgggtctgggcttcctctggttcaacacctacccggccatggtcttcatgggcgacatcggcgcactggcactgggtgcggtgctgggcacgatcgcggtgatcacccgccaggagctggtgctggtgatcatgggcggcgtgttcgtcatcgaaacgctgtcggtgatgatccaggtcgcctcgttcaagctgaccggcaagcgcgtgttccgcatggcgccgatccaccaccatttcgaactgaagggctggccggagccgcgcgtgatcgtgcgtttctggatcatctccgtcgtgctcgtgctgatcggcctggccacgttgaaggtgcgctgagatgaacgacctgtcccgccaggcaacacgccttgaagccatcgaaggcagctacgacaagtggctgctgggcgcgatcatcgcgctcaccggtgtcggcgtggtgatggtggcctccagctcgatcgcgctgatgagcagcccgttctattacctcaaccgccacctgatcttcctggcggtgggtatcgtgctggcggtcattgccgcccgcaccgagctgaagtcgatcgagcagtacaaccagatgctgctgctgggctgcttcgtactgctgctggcggtgttcgcaccgggactgggcagcacggtcaacggtgcgcgccgctggatcaacctgggcatttccaagttccagacggtcgaagcggtgaaagtgctctacatcgtctggctgtcgagctacctggtgcgtttccgcgacgaggtcaatgcgacctggccggcaatgctcaagccgctgggcgtggccggtgcgctggtggtgctgctgctgctgcagccggacttcggttcctcgaccctgctgctggcgatcaccgccggcatgctggtgctgggcggggtgaacatgccgcgcatgtcgatgccggtgatcatcggcctggtcggcatgagcgcgctggcgatcatcgagccgtaccgcatgcgccgcatcacctccttcctggacccgtgggccgaccagcagggcgacggctaccagctgtccaacgcgctgatggcggttggccgtggtgaatggaccggcgtcggcttgggcaactccgtgcagaagctgtactacctgcccgaagcgcacaccgacttcatcttctcggtcaccgccgaggaattcggtttcctgggtacctgcgtgatcgtggcgctgtatgcgctgctggtcggccgcaccttctggctgggcatgcgctgcgtggaaatgaagcgccacttctccggctacatcgccttcggcatcggcctgtggatcagcatgcagaccttcgtctcgatcggcgtgaacctgggcatcctgccgaccaagggcctgaccctgccgctgatctcctccggcggttcgtcggtgctgatgacctgcgtggcgatgggcctgctgctgcgcgtgtcgtatgaactcaaacgcgccgagcgccgccaggccgtgcgcatcggtggcgccgaagacgccgcggccgaaccgatggacaagcccgccgcagcggtggacgccagcgtgccgatgcgtgccgagccggtcgcacccgcgtccgctgcagcgagcgccgcacgtggcaccagccgcctgcagtcgcgcatcgaaccgaccttcgggaggctgtcatgagtgcagccaccgagagtgggcgcccggtgatgatcctggccggaggcaccggcggtcacatcttccccggcctggccgtggcccgcgtgctgcgcgagcgcggcgtgccggtgacctggatgggcgccgacggtgcgatggaaacccgcctggtgccgcagcgcgacatcgccatcgatacgctggccatcactggcctgcgcggcaagggcaagctggccctgctggcggcgccgtggcggctgatgcgcgcgctgcgcgcggccgggctcatcatccgccagcgccagccgcgcgcggtggtcgccttcggtggctttgcctccggccccggtggcatggccacgcgcctgcatggcctgccgctgatcgtgcatgagcagaaccgtgcgccgggcctgaccaaccgcatcctgtcgcgttatgcgcgtcgcctgctgaccggtttcccgggcaccttcgccaagggcgaggagttcgtcggtaacccggtgcgcgcggaaatcgctgccatcgcgccgccggaacagcgcttcgccgaccggcagggcccgctgcgggtgctggtggtgggcggcagccagggcgcgcgtgccctcaataccggcgtgccgcaggcgattgccgcgctgggcgccggcctgccggtgcaggtgcgccaccagagcggcgagaagatgcatgccgaagcggtggaggcttacgccaaggccggtgtgcaggcggaaatcacgccgttcatcgccgacatggccgaagcctttgcctgggctgacctggttgtctgccgcgccggcgcgtccacgctggccgagctgtgcgcggtcggtgtcggcagcgtgctggtgccattccccgctgccgtcgacgatcaccagacccgcaacgcggagtacctggtcgagcgcggcgcggcggtgttgctgaagcaggacggaacgctggccgacggcattgccgcaacgctgcgcgatctgtccgaaaatcccgcccgccgcatgcagatggcgcaagccgcgcgtgccctggccaaggtcgatgccgccgagcgcatcgccgatatcattctcgaggaagctgtatgaagaaggcatgccaccgcgcctgccctgcgcgaggccgcgcatgatccgtcgcctgcacgacaccaacgacctggtgcgcgcgttcccgcgcgtgcatttcgtcggcatcggcggcaccggcatgagcggtatcgccgaagtgatgctgacgctgggctatgaagtgtccggctcggacaacgccgacaacgtggcgacccgccgcctggccagcctgggggcgcgcatcatgcgcggccactccgcggccaacgtgctgggcaccgactgcgtggtggtctccagtgccatccgcgaagacaacccggaactgatggaagcacgcagccagcgcattccgatcatgccgcgtgcggcgatgctggccgagctgatgcgcttccgccgcggcatcgccgtggccggtacccatggcaagaccaccaccaccagcctgaccgctgcggtgctgagcgaaggtggcctggacccgacgttcgtgatcggtggccagctgctggccgccggtgccaacgccaagctgggtggcgggcagtggctggtggccgaggccgatgaaagcgatggcagcttcctgcgcctgaacccgctgatgtcgatcatcacgaacatcgatgccgaccacctggaaaactacggcaacgatttcgcccgcgtgcaggcggcgtttgccgagttcctgcagcgcctgccgttctacggcctggcggtactgtgcatcgatgatccggaagtcgccgcgctggccgccaggaccccgcgccacgtgatgagctacggcatgagcccgcaggccgacgtgcgcgccgagaacgtggtgcaggaagggtcgcgcatgcgcttcaccctgcgcctgccgcagggcaccagccaggaagtggtgctggcgctgccgggcaggcacaacgtgctcaacgcgctggccgccgctgcggtgggctggcagctgggcgtggccccggacgcgatcgcacgcgcgctggagggcttcgccggtgtcggccgtcgcttcaacgatctgggcgaggtgaccaccgccagtggcgccaaggtccgcatcatcgacgactatggccatcacccgagcgagctggaggcagtgttcgccgccgctcgtggtggctgggccgacaagcgcctggtggtggccttccagccgcaccgctacagccgtacccgcgaccagttcgacaagttcgccgccgtgctgtcgagcgttgatgcgctggtgctgagcgaggtctacccggccggtgaagaaccgattgccggcgccgactcgcacgcgctggcccgtgccatccgcgcgcgtggccgcagtgagccggtggtggtgggcaaggccgccgagctggccagcgtgctgccggacgtgctgcaggacggtgacctgctgctgatgatgggcgccggcgacatcggtgccgtggccacccatatcgcggtggaaggtttcaagggggagggccaggcgtgagcacgctgaccttcccgccgctgcgcgtgaccgacccggccgagttcggccgcgtcgccgtgctgctgggcggcagttccagcgaacgcgaggtgtcgctggattcgggccgcaacgtgctcgaagccctgcagtcgcgtggcgtcgatgcgttcgcggtggacggcattccggcgctcgccagcgcgctcgccgccggtggcatcgatcgcgtcttcaacatcctgcacggccacaacggtggcggtgaggacggcatcgtgcagggcctgatggacgccttcggcgtgccgtacaccggctcgaacgtgctgggttcggcgctgagcatggacaagatccgcaccaagcaggtgtggctgtcgctgggcctgccgaccccgcagtaccgcaaggtcactgccgaggacgtgcacgccaatgccgccgaactcggcctgccggtggtggtgaagccggccaacgaaggctccagcgtgggcatcagccgggtcaccgatgacgccgggctggatgaagcggtggccctggccgcgcgctatgacggccagctgctgatggagcagatggtggtcggcgacgaattgaccgtggccatccttggcgacgtcgcactgccgtcgatccgcatcgtgcccaagggccagtggtacgactacaacgccaagtacatcgccgaggacacccagtacctgtgcccgggcctggacggtggcgacgaagaggacatccggcgcatcgcgctggccgcgttccgtgccgccgggtgccgtggctggggccgcgtggacgtgatgcgcgatcgcgacagcggccgtttcttcctgctggaagtgaacaccgcgccgggcatgaccagccattcgctggtgcccaaggcggcccgccaggccggcatcggtttcgaggaactggtgtggcgcgtgctggaacagaccctggaggcctcgcacgcatgaacgcggtgctgcgcatcttcgtctggctgttggcgctgtcggtggttgcactgccggtggtggccgtggtcaatggctgggtcggcgccgagcgctggccactggcgaagctgcgcgtgcatggtgagttcaagcgggtgccggccgaacagctgcagcaggtgctgctgccgtatgcgcgcgccggtttcttcgcggtcaagctgcaggacgcgcaggacgccctggagaagctgccgtgggtggaaagcgcgcaggtccgcaagcagtggccggacgtgctggaagtgaccctggtcgagcacaagccgttcgcccgctggggtaccgaccgcctggtgtccgagcagggcaagctgttccccacgccgaagaagctgtccgacctggcgctgccggagctggatggcccggacagccagaccgcggaagtgatgaagctgtacagcgactcgcgtgcattgttcgcaccggccggcgtcgatgtgcgccgggtgacgatggacgcacgcggcagctggtcgctggtgctgagcaacggcaccgaagtggtggtcggccgcgacgacgcgcgctcgcgcatgcagcgcttcgtcaaggtgctgccgcagctcaaccgtcaggacgcgccgatcgagcgcgccgacctccgttacaccaatggtttcacgctgagctggggtaccccggccacgccggcgaaaacgccggcgaccccggccagaagcacgcaggaaaggacatgaatcgcaagggtgacaaatcgctgatcgttggcctggacatcggcacctccaaggtggtggcgctggtgggcgagtattcgccgggcaacccgatcgaagtgatcggcatcggctcgcacgaatcgcgcgggctgaagcgcggcgtggtggtggacatcgaatcgaccgtgcagtcgatccagcgcgcggtggaagaagccgagctgatggccggctgcgagatccgttcggtgtacgcctcgatctccggcaaccacgtgcagtgcaagaactcgccgggcatcgtgccgatccgcgacggtgaagtgacctggggcgacctggatcgcgtgctcgacgcggccaaggcggtggcgatcccggccgaccagaagatcctccacgcgatcccgcgcgagtacgtgctggacgattcgcaggaaggcatccgcaacccggtcggcatgaccggcgtgcgcctggaagtgcatgcgcacctggtggtgtgcgcgcagtcggcggcggccaacatcagcaagtgcgtgcagcgctgcggcctgcaggtggacgacctggtgctgtcctcgctggcctccagcgtggcagtgctgaccgccgacgagcgcgagctgggcgtggtgctggtcgacatgggcgccggcaccaccgacatcgcggtgttcgtgcagggtgcgatctgccacaccgcctcgctgccgatcgccggcgaccacgtgaccaacgacatcgcgcacatgctgcgcacgccgaccccggaagccgagcagatcaaggtgcgctatgcctgcgccctggcccagctggccacggccgaggagagcatccaggtgccgtcggtgggcgaccgcccgccgcgccgcatgccgcgccattcgctggcgcaggccgtgcagggccgctacgaggaaatcttcgagatggtgcaggccgaactgcgccgctccggcttcgaggagctggtgcgcgccggcatggtgctgaccggtggcgcgtcgaagatggaaggcgtggtcgaactggccgaggaaatgctgcagatgccggtgcgcgtgggtatcccgcagcacgtcaccggcctgggcgaagtggtcggcaacccggtacacgccaccggcgtgggcctgctgctgatgggcagccagatcgagcacccgcggcggccgtcgctgcccaccgggcgcgccggaagcatgttcaagaaactcaagacctggttccgcggcgagttctgacgcggaacccgtaaacccgggcctcgcccgggcgcaacacccgcagtacccgcatcacaacgcagtaccggctacacacaacccacacagccgcaacgtcggcatgcagcaggacggcaggacgcccgaatgcccatgccagccaaagcggatacaacgaggacacggacatggcgcattttgaactgatcgaaaagatggcacccaatgcggtgatcaaggtggttggcgtgggcggcggcggcggcaatgccgtggcgcacatggtcaactcggcagtggatggcgtggaattcatcactgccaacaccgactcgcaggccatcaagaattgtggtgccaagctgcagctgcagctgggtaccaacgtgaccaagggcctgggcgcaggcgcgaacccggaagtcggccgccaggccgcgctggaagaccgtgagcgcatcatggacgcgctgcagggcgccgacatggtgttcatcaccgccggcatgggcggcggcaccggtaccggcgctgcgccggtggtggcacagctggccaaggaaatgggcatcctgaccgtggccgtggtcaccaagccgttcccgttcgaaggccgtcgccgcatgcaggtggcgctgaagggcatcgaggaactgagccagcactgcgactcgctgatcaccatcccgaacgagaagctgatcaccgtgctgggtcgcaacgcgaccatgatccaggccttccgcgctgccaacgacgtgctgcagggcgccgtgcagggcatcgccgacctgatcgtgcgtccgggcctgatcaacgtcgacttcgccgacgtgcgcaccgtcatgtccgaaatgggcctggcgatgatgggtaccggcaccgcccgtggcgatgaccgcgcccaggccgctgccgaatcggcgatccagaacccgctgctggacgatgtgaacctggctggtgccaacggcatcctggtcaacatcaccgccggcgccgatttcaccatggccgagttcgacgagatcggccgcaccatcgatggcttcgcttccgaagatgccaccgtggtggtcggcaccgtgctcgatccggacatgcaggacgaagtgcgcgtgaccgtggtggccaccggcctgaaccgcgtctcggccagcaagacccagcgtccgggcgagcgtgcgccgatcaagctggtccgcaacgccaccaccggccagccggagttcggcgagttcgacaacggcggcgatgccgtctccaaggcggtgggtggcatgggcctgggcctgcgtcgcgccagcagcgataccgcagcggcctccgccccttcggccccggccgcttcggccccggcggcggcggaactgccgaacgattacctggacatcccggcgttcctgcgccgccaggcggactaagcggggcggcccggggttgtcctccccgggttgcgccaccatgtcctgaaaacgcgggcgccgggccaggatgggcccggccgccctgcttcacgcgctttccagcggcgtgccggtggatcctgccggtggctgcaactggcgtttcagccggggtaggggagtgcgcgtgttaatctaatgtgtcacttccggtccatcccccatgatccagcaacgcaccctcaagaacacgatccgcgccaccggcgttggcctgcacagtggtgacaaggtctacatgaccctgcgcccggcaccggtcaaccatggcatcgtgttccgccgcgtggacctggacccggtggtggaggtgccggccaaggccgaactggtcaccgaagtgaccctgtgcaccggcctgacctgcaacgacgcaaagatccagaccgtcgaacacctgatgtcggcgctggccggcctgggtgtggacaacatcatcgtcgaactgtcctcggccgagctgccgatcatggacggttcggccggcccgttcgtgttcctgctgcagtcggcgggcatcatcgaacaggatgcgcccaagcgcttcatccgcgtgctcaagaccgtggaggtgaccgagggcgacaaggtggcccgtttcaccccgtacgagggctacaagctgggcttcaccatccagttcgaccacccgatgatcccggccaagcagtcgcggcaggaaatcgagttctcgacgctggcctacaccaaggaaatctcccgcgcgcgcaccttcggtttcatgcgcgacctggaatacatgcgcgagcgcaacctgggcctgggcggttcgatggacaacgccatcgtgctggacgagttccgcgtgctcaacgaagacggcctgcgctacgccgacgagttcgtgcgccacaagatccttgacgccattggcgacctctacctggccggtggccaggtgctgggcgcctacgagggcttcaagtccggccacgcgctcaacaacaagctggtgcgggccctgatggccgacgccagcgcctgggaatgggtcagcttcgactcgccgaccagcccggatccggtggaatatgccaccccggcctacgcctgattccatagatcgttgaatttcaagataaaaacgccgccttccagggcggcgtcgttgtttccggcgcttgcgacgcattcagcgtgcttgaaaggcgtcaaggccggttcaaggtcacggttttgtgaacctgttggatcggaagcctgaatttaacgaagttttaacttcaatctaacgacaggcctccggatggccgctaggatgcgacccggcccccgaaatgtttcacgccgtggtgacacgcgcgacggggagcggagccggatgctccgttgccatcaggatcgcttcttcggcttcgagggaacgtcctgcaggcaagccaaggcgtcgcgtagccctttgtgcgtggcggctgaaactgcgtgggggccattccggttgtcgatcgctggggagcgtgagggagtggtggacgcagtcttgatggtcaccctggtggccttcagcccgatggaacgggccgcgtcgagcaactgggcttcggcaagccgcaacttggcatgccagaccggggactcgacgagaaaaacgaggtgttccccgtccacattggccagccggcagcggctgcgcagaggtggcggcaactgggggcgcaactgccggtccagcgcgtcgagccacaaggcccgacgcagcgggttcccgcttttgtccgccattaccgcatccagcgccggtttcggcactgacgcggggcgaacgctggatttcggctcagacatgaaaactcactgatggcattcaaaaagatcgtaatcaaaacgcgtgaaggacaggccaaggcgtcgccgatcacgcgtttgcggttctatttcgaggaccgcccccgcgccctgctgggcagcgtgctcggggtaggctgcattatcggccttgccggcggcattggcgccagtgcgctgaatgattcgcgcctgcaggccaaggtcgagcgccaggatgcggagctggccaaggtcaagcgcgatgcgcagacccaggtcaacgcgctggctgcccgcctcggcgagctgcaggcgcaggccacccgcctgaacgcgcttggcgaacggctgacccagatgggcaagctggaagatggcgaattcgacttcaacgagacccccggcctcggtgatggcgacgccggcggcccgaccagcgacatcccggtcaaggacgtcaacgccgacttacaggtgctggagcagcgcttcgctgcttcaggccgccagttgtcggtgatggaatcgctgatgttcgaccaccagctgcagcagaacgccgtgccgtcgcgcatgccgatccgcaacagctacgtgacctccggcttcggcacccgtgccgacccgttcggccgcggcgccgccacccacaagggcatggacttccacgccaaggtcggtgacccggtgatggccgtggccgaaggcgtggtcagcttcgctggtgtgaagggcggctatggcaacgtcgtcgatgtcgaccacggtaacggctatgtcacccgctacgcgcacaattcgcgcctggtggtgaaggccggtgacctggtccgcgccggccaggaagtggccaaggccggttccaccggccgttcgaccggtgcccacgtgcacttcgaggtgtgggagaacggcaacgtggtcaacccgcgcaagttcctcggcgacggcggcaacacgccggtcggccgcgtcagccgcggctgatgcccgggtcggattccttccgcgccgcggaagggctctgacccgattcggttgagggctggggtcagagccctttcgccatggcgaaaggggtccgaccccgcatccgtgtttctttgccgaatccggggcgattgcgaccggattggcgcttgaaacctcagccgcccgtcccaagctacaatgggtgttgccatcgacagggcgccaggcgccctgtttcgtttgcggcggacggatcccaagggggaggccgggcgtcgtgtccatccaacccggttccttcaatgatcaacagcctgcttacccgcgtatttggcagtcgtaacgaacgacagctgcgccagctcaaccgcatcgtcgccaagatcaatgcgctggagccggagatcgagaagctttccgacgagcagcttcaggccaagacgccggagttcaagcagcgcatcgccggcggtgaagccctggacaaggtgctgccggaagcgttcgcggtctgccgcgaagccggccgccgcgtgctgggcatgcgccactacgacgtgcagctgatcggcggcatggtgcttcacctgggcaagatcgcagaaatgcgcaccggtgaaggcaagaccctggtggcgaccctgccggtgtacctcaacgcgctggaaggcaagggcgtgcacgtggtcaccgtgaacgactacctggcccgccgcgacgccgcgcagatgggcaagctgtacaactggctgggcctgagcgtgggcgtggtgtacccgggcatgccgcacagcgacaagcgcgaagcctacgcggccgacatcacctacggcaccaacaacgaattcggcttcgactacctgcgcgacaacatggcgctgtccaaggccgaccgttaccagcgcggcctgcactacgccatcgtcgacgaagtcgactccatcctgatcgacgaagcgcgtaccccgctgatcatctccggtccggccgatgattccccggagctgtacatccgcgtcaaccgcgtcgtgccgcacctggtcaagcaggaagcggaagacggcgagggcgatttctgggtcgacgagaagggcaagcaggtgcacctgtccgaagcgggcatggagcacgccgagcagctgctggttgaagccggcatcctcgacggcgagaccgaaggcctgtacgcggcgcagaacctgaccgtggtccaccacctcaacgccgccctgcgcgcgcacgcgatctaccagcgtgacgtggactacatcgtgcgcgacggcgaagtggtcatcgtcgatgagttcaccggccgtaccctggccggccgccgctggtccgacggcctgcaccaggcggtggaagcgaaggaaggcgtgccggtccagcgcgagaaccagacgctggcgagcatcaccttccagaacctgttccgcatgtacaagaagctgtccggcatgaccggtacggccgataccgaagcgttcgaattccagagcatctacggcctggaagtggtggtgatcccgaccaaccgcccgaccatccgcaaggacagtccggaccaggtgttcctcaaccgcaagggcaagttcaatgcggtgctggccgacatcgaagagtgcgccaagcgcggccagccggtgctggtgggtaccacctcgatcgaaacctcggaaatgctgtccgagcacctgagcaaggccggcgtgaagcacgaagtgctcaacgccaagcagcatgaccgcgaagcgaccatcgtggccaacgctggccgcccgggcgcagtgaccatcgccaccaacatggccggccgcggtaccgacatcgtgctgggcggttcgctggaagccgagatccacgccctgggcgaggacgcgaccgacgagcagaaggcagcggtcaaggccgaatggcagaagcgccacgaggcagtgaaggcggcgggcggcctgcacatcgtcggcaccgagcgccacgaatcgcgtcgtatcgacaaccagctgcgcggccgttcgggccgccagggtgacccgggttcgtcccgcttctacctgtcgctggaagacaacctgatgcgcatcttcgcctccgactgggtgcagaaggccatgcgcatgatgggcatgaaggaagacgacgtcatcgaggaccgcctggtcagccgccagatcgaaaaggcgcagcgcaaggtcgaggcccacaacttcgacatccgcaagaacctgctggacttcgacgacgtcaacaacgaccagcgcaaggtgatctacgcccagcgcgacgagctgctggatgccgagtcggtgaaggcgaatgtcgatggcatccgcgacgacgtgatcttcgacatcgtggcgcgcttcgtgccgccgaactcgatcgacgagcagtgggacctgcgcggcctggaagcgaccctggagtcggacttcggcctgcagatgtcgctgaccgacctggtcaaggaacacgaagagctggacgccgaggccatcgccaccaaggtccaggagcgcgtcaaccagcacttcgccgagaaggaagccggcctgggcgaagaaaccatgcgcgcgctggagaagcacgtgatgctgaccgtgctggaccagagctggaaggagcacctggcgcgcatggattacctgcgccagggcatctacctgcgtggttacgcgcagaagcagccgaagcaggaatacaagaaggaagccttcgagctgttctcggacatgctggagaacgtcaagcgcgaagtggtgaccctgctggcccgcgtgcgcatccgcagcgacgaggaagtgcaggcgctggaagcggccgagcgccagcaggcgcaggcgcgcctgagccagtcgcagttccagcaccaggatgccggcggttacagcgccgacgaggaagccgcgcaggtcgaagccgcccagcagggcgtggccacgctgcagcgcgacgagccgaagatcggccgcaatgatccgtgcccgtgcggcagtggcaagaagtacaagcactgccacggccagctgagctgaccccggaaggccccgcgcaagcggggccttctgctttggcgcgggcgatccggcgcggattcgtgattgcgctggccgccctgttctgggcatgctggccccatggtttctcccacccgatcgatccatgtcgtggccgccgtcatcaccgacgcccgtggccgcgtgctgctcaaccgccgtaccgagaaccgcgacatggctggcctgtgggagttccccggcggcaagcgcgaatccggcgagacctccgaacaggcgctggtgcgtgaactgcgcgaagagctgggcatcgaggccgatgtcgggccttggctgatggatgtgccgcagcgctatccggacaagcacctgaccctggaagtgcgccacgtgcgcagctggaagggcacaccgcgcgggcgcgagggccaggcgatcacctgggtggcgcaggacaagctgggccgctattccatgccgccggccgacctgccggtggtggccgcactgcgccaaccggatcgctacctcatcacgccggcgccggccgaagatgccggcggcgtgcagcactggcatgaacggctgcagcaggcagtggcggcgggccagcatcgcatccagctgcgcctgccgccggagcatccgcaacggcaggcgatgatcgaacaggccgtgcgcgcgcatcgtcgcggcgtgcagtggctgctcaaccgcgatgtcgcgttggcccgcacactgggcgtgggcgtgcacctgggcagcgagcagttgctggccctgcaggagcggcccttgccggaaggacagctggtcgccgcgtcctgccacgacctggagcagctgcaggcggcgcagcagctgggctgcgacttcgcggtgctcggcccggtgcaggccacggccagccatcccggggcggtgccgctgggctgggaggccttcgctgcgctgcgcgcgcaggtatcgctgccgatctacgcgttgggcggcatggccgccggccatatcgccgaagcgcgtcggcatggcgggcagggcatcgctgcgattcgtgggctgtggccggcgtgagccggcatgcagggtcagatccctgcgcagcagggctctgaccccatcgcggcaatccggggtcggagcccttttcgctgggaagggatccgacccctcccgatcacaacgtaatccagaagcatccgtattgccgccgcaatcccagcaccgtggacgctcgcgacgcgctgccgggcagcgtctgctccaggcgcaggccgaccggatgccgtggcgctggcggctcagggtcggattcctgcgccgcagggctctgactctcttcctgcgaggacgccagcccctgtggcggatacaccggcaccacgtccaccagtggccgccgtgccaaggattccaactggccgaggatgcgctgcgcgccggcatcggagaccgcaccccacaggtacagcgaggacagccggttcacatcgttgctgacgatgccggtgcgcagtgcgtccaccagctcgctcaggcgtcgtgggcagcgcgcacccagggtgtcgcgtggcagggtgctgccggtgggcgcgggcggtggcaatcgcgaccgggcgccaacgctgtcgcaggggcggtcggtatacacgctctgcccctgcgcatcggtgcagcggttcaagcgcggggactgcgcatggacaatgctcgataccgaacacaacgacagcagcaacagcaggaaggaaaaccggttcatcggcgcagggtagcgccgatcgcggtggcatggcgtgctttcagccgtgcagcagcttcaacaccgacgtggtcggcttggccaggttcaaggtgtagaagtgcaggcccggcgcgccgccctcgatcaggcgctggcacagtttggccaccacttcggtaccgaacgcccgcaccgattcggcgtcatcgccataggcctgcatcttgcggctgatccagcgcgggatctccgcaccgcattgctcggagaagcggcgcagctggctgaagttggcgatcggcatgatgccgggcgtgatcggcacctgcacgccgagccggcgcacggcatcgacgaagtggaagtacgcatccgggttgtagaaatactgggtgatcgccgcgtcggcgccggcatcgatcttggccttgaagtgcttcaggtcggccagtgcatcggaggcctgtggatgggtctccggataggcaccgacttcgatgcggaaggcggtgccgtgttcggcgcggatgaagtcgatcagctcggcggcgtagcgcatgtcaccggggaagcccatgccggagggcaggtcgccacgcagcgcgaccaggcgatggcagccgatggcgcggtacagcttgagcagttcgcggatttcctggcgggtgccgccgacacaggacaggtgcggtgcagcctcgaagccgtggtgctggttgaggtggcgcacggtctcggaggtatagctcagggtcgagccaccggcgccgaaggtacaggacacgtactcggggtcgtagtccttcagcctggccgcggcgcggtccagctggctgcgctgttcgtcggtcttgggcggatagaactcgaagctgatggcggtcatggcacgggcggcagcggcgggtgcgggtcagtatatcgcttcatcaagatggatgttagttggctgcatggactggcaccgtccgccgccggcgaccgtttgcccgggtctgcggccgttgctccggaatcgcaacctggctgccgtagccgggcgcacgctgctcccatcccggcaccccccacctgatgaaggagcacacgatgaagatcttcctggcactctggtacgcgatgaaggccctggcccggctggcgatgatcggcatggcgatggccgtgctcggctccggttccgcgcatgccgccaccggctcgaccgctggcaaggtacaggtcgaggtggtcggcatggggcgaccgctgctgatgatccccggcctcaacagcagcgccgaggcctggcgcgagacctgcctggccctgaaggacgtgcagtgccacctggtgcagttgccgggctttgctggcgcggcagcggccgacccgcgcccggccggcttcctgccggcgatgcgcgggcagctgctggcctacctgcatgaccagcacctggggccggtggtggtggtcggccacagcctcggtggcgtgctgggcctgcagatggcgcaggccgagccgaaggcgatcagcgcactggtggtggtcgatgccctgccgttcctgccggcggcgcgcgacccgagtgccaccgctgacagcgtgcggccgatggccgaccagctgcgcaagggcatgctggccgccgacgccgcgcaatggcaggcgcagttgaaggcgggcctgccgggcatgacccgcgatccgcggcgccaggccgaactgggccgctggggcgaagccagcgaccgccagaccacggccgatgcgatgcatgcggtgatgaccaccgacctgcgcgacagcatcgcttcgatcaccgcgccgacgctggtgctcggcagctgggccggctaccagccgatgggcggcaccgaggacggcacgcgtgcggtgttccaggcccagtacgcgaacctgcagggcgtgcagatcgcgatgagcgcgcagggtttccacttcctgatgtgggatgatccgcgctggttgcaggaacaggtgcagcgattcctcgccgcgcatccctgacccttgtccgccctcctgccaccgccgagagcccgcatggacgccaccacgccttcccgccgtttctggacgctcaatgcactggcatgggccggctatgcgctgtacgggctgtgggtcggcatgcggatcggtggcggcatcgtgttcagtggcatcgtgctgatcaccgtcagcgtggcggtctcactctggctgtgcagcggcgcattgcgttcggttgcactgcgccagcgctggtgggagggcagcctgggcagcctggtgctgaaactggctgccggcgtggtgctcggggccagcgtcgcacaggcggtaacggcggcgctgctgctgccggcgctggcgctgggttgggtgcagctgcctggcggccatgcggattaccagtggtcttcggtgctgctgtactggatgaacaccgcgttgttcctgctggtgtggaccggtttgtgggcgggcctgcacggcctgcggcgggcacgctacagcgagctggcacgcctgcgcgccgaagccgaacgcagtgcgctggaacgtgacgcactgcgtgcgcggctcaatccgcatttcatgttcaatgcgctgaacaacctgcgtgcgctgatcctggaagacccggaacgggcccgtgacatggtcacccgcctgtcgcgcacgctgcgccaggcgctcgcccacaaccgcagcgagcaggtcacgctggccgaggaactggcggtggtcgatgattacctggccatcgaggcggtccatttcgaacagcgcctgcaggtgcggcagcagatcgatgccgatgccacgcaggcgcagctgccggcgatggcgttgcagttgctggtggagaacgcgatcaagcacggtatcgccagccgtcccggcggcggcgaggtgcagatccgcgccacgctggacaatgacgtgctgcggttgcaggtggacaatccacttccaaccggcagcgaacccacccatggccatggcgtcggcctggcctacctgcgtgcgcagctgggcatgcgtggccgattcgtgctgcaaccggccggtgaccgcatgcaggccctgctggagattccgcaatgactggcatgctgcgcgtgttgatcgtcgatgacgcacggctggcccggcaggagctgcgcacgctgctgtcggcgctgccgtgggtgcagtgcgtgggcgaggccgacgacgtgcccgccgcacgcgaggcgatcaccacgctggcaccggacctggtgctgctggatgtgcagatgccctccggcagtggtttcgacgtgctggacggcctggacacggtgccggccgtggtcttcgtcaccgcctacgacacctatgcggtgcgtgcgttccaggccaacgcgctggactacctggtgaagccggtggaggcgccgcggctgctggaagcgctcgagcgggcgcggcagtgcgaggcggttgcggccgacgtgccggaatcgcgcggcacgctgggcgcgcacgaccaggtgttcgtgcgcgagggtgaacgctgctggttcgtggcagtctccgagatccgtcggctggtggtggatggcaactacacgcggctgtggttccgcgaccagaacgcactgctgacccgcagcctgagcgcgctggaagcacgcctgccgccggatcttttcttccgcgccaaccgcaacacactggtcaacctgcgccgtatccgtggggtgtcgcccagcatcggcgacggctatgacctgacgctggatgatggcagcgaggtggaggtatcgcggcggcaggcacgcgagctgcgcgagcggatggcgttgtaggtgctgccagcggttaccctgtgcagcggattcccagatcacgccgcgccatgtccatcgtcctcaccgatttcgcccgtccccgcctgttcccgcgcgtgccacgcggcaataccatccaggactgcactgccgagcagttcgaggcacacctcaatgcgcacgcgccgctgaaggtgctcgacggctacgccccgttctgcaagttgttcgtctacgagaactggaccagcacgcgctgcctgacggtgccggtcaccgaggccaaccgccaccagctgcgcagcggctacgaagcgcgcaaccgcgaggaactgccggtactggtgcgctggttcgagggcgtggagtcgccgcgcgcgaactacctggtggtgatcctgtacaacgccgagcagctggccagggaaggctcaccgatcgaagccgactggggcatcgtcggctgcatctataccgccgaaccggaagaagtgccgatggcgccgatcaccatgatgcgcaatgcgctgggcgtggaggagggcggttccggcgtgccattggacaaggaggcctaccggcgctcggtggagttctgggagaacaacgccaactggcggccggggtcggatccccgcatcgcagggctctgacccgatcattcgagcccccggtcgaagcctttccctgaggaggggatccgaccccaggcgcgcgctatgatcgggccaggcaaacccaaggagggcagggcatggcggtctgggcaaggatgatcctgatgttgctggcgggcacgctgcccgccaccccggtactggccgcgaagccctctgccgggatggcctgcgaacccatggcacgccttcccgggctgcgcgatgcgggcgtgaccgcgctgtcgatgcagccgcaggacggccgctgcgtgattgaagtggcggcggccaatggcaacgcgctgcgtcggcagcaacgaatgctggaggcgctggtgcagcatgcctgtgccgcgccggcgcacgtgaccgtgaatgaggtgcaggtatccctgcagctgcgcctgccgacgccctgcacggcacgcagcaaacgggatctgttcgcgggtgaaggtattccctggctgcctccacgcggcgtgtcgccgcgctatccggtggaggccatgcggcaggggctgtccggccgcagcatgctgaaggcgttggtcgatgcgcgggggcgcgttgcggccgtgatcgtggagacctccagcggtcatgcgttgctggatgacgctgcagcggaggagctgcagggctggcgtttcagccgcgccgatgcgaagggtacggtgccggcgttgaccctcgtgcgcatgccgatgcggtatgaattcgtggagtgagcgtcatccatgcatggcacggatctggacgtaccgcagcggagccacgccgtgcgtggctgcatcactgtcagaggcgcttccactcccaccacgggtagtggtattcgcgctcggtggcgctccacggctgcgtgcaggacgtgcacgtcacccggtagcactcaccccagccatcctcggcctcgcctcgtccgagcagcagcacgtggccctgttccagcagcggtgcagggttgaagaacacataagaagggtagagtgcgcacaggcacccctcacgcgcctgccagtagcgcagccgttgcagggcggccttcaggtgcgcctggttgctgatcagcatgccgccaagggcgatgccctcgcagctgcgttcgatcgtatccacatgtgcgaccaacgcgtccaacgacgcggtgctgaacagccgtgccaccgtgcgtgcggcatcggtgatgcgcgtggcatcgcgcgacagcaggtcctgcagcagcacgtcggcctgtgcatcgtcgagcaggggtaccggcgctgcagaccacggccagcgcatcagcgtgacttgccgatggcagcgtagtggccggcggtgaggcgcagaagatcggccggtgccagttctacctcgaggccacggcgcccggcgctgacatgcagcgcgggcaacgcttcggcactggcgtccaggaacgtgcgcaggcgcttcttctgccccagcgggctgatgccaccgaccaggtagccggtcgcgcgctgtgcggcatcggcggcggccatctcgcacttcttgcagccggcggcttcggccagcgccttcaggtcaagctgaccggcgaccggcacgatcgccaccagcagttcgtgtgcttccgtgctggccagcagggtcttgaacacctgggccgggtcgaggccgagcttgtcgacggcttcgccgccatacgattcggcgtgggcgtcgtgcacgtagctgcgcacggtgtgggcgatcttctcgcgcttgagcaggttgatggccggggtcatgggcgcatcctagcgcgagatagggatattgccttgaccgaaactcgcgcatcaacgcaggacgggcccccgaaggcgcccgtcccggctgtgatcgtcggcatcccgcgtcagcgcgacatcgactgctgcgtctgaatctgttcctgggtctgtcgctgcgacagttcgttgtccagcgcctggctatgccgcgtgctgtcctgcagcgtgtggttcgccgcctgcgacaggtcgacgtaagtgcggtgcatggcgggatcgccaagctggccctgcacggcgaacacgccctggttgtccggccgcgccagcacggtatcgacctggctcatgccggccagcttggactcgtaagccaccaggcctgcggcgttctcgagctggctgcggtcattgaacagtggcgccaggccaccctggcggcgttgttcttccagcgtttccagcttttccacgacctgctggtaacgcgggttgtcggcgtggccgggggtggccatggtcggttcggcggcctgctgttgctgttgcgcgatggccttgtcgagcgcacccagggtggtggcaccgaccttgccatcgacggtgagctggtgctcacgctggaactgcttgaccgcttccagggtgccgggcccgaaatcgccatcggctaccagtggcttgccgtccttgcccagatagcccaggtcggccagcttctgctgcatcgcctttacctcatcgcccctggcgccgctgaccagtacgccgttgccgccgggcgcgccgggcgacccgtgcgagggggcatgggtgggggtgatgcccagctgggtcatggcccggtcgaagcgctcatcgcggctggtcaccgcggccggcgactggatgccgtacttggtggcatcgacgaagttctgcacgtcgccgcgggtcggcggattgccggcctggaccgtaccgccctgcagcttttccgcgttgccggccagatagctgatgaactgcgggcccatgccgccgaactggttgtcatagtcggccatggccagctgcagttcggggttggccgcgatggcatcggcggcggccgggttggtggcacgcaccttggcgatggcttcatcgacgcgctcgatggcgctgtccagcttgtcgttggtgagctggtccatcttcgcctgcggaatggcctgcaacttggcgtcaagcgccgccagctgccgggtgctcaatccgccctgctgggacagcagttcgatgtcagcggcggtgaagccgttgtcgcgcaggaaacgcctggcctgcggattgccgccgacatcgaactgcaccagtccgaacgagtaggtgcttgcgcctttctgcgcgtatgagaagtggtccaggtggcgggtgttgccgcccagctccgtgttgaggaacagcgtggacagctgttcgcgggtaagggtggaatcctttgccatggtcatcgtccttcaatgtgggaaaaagcgccgggcgcacccagcggatgtcagccggcgcagtgctgctgcgtgaagccgagcagctggcggacggcctgggtgccgtaggcggccgatgccggttcgagggcgaactggccgaccatctggttgctgcacaactgcacgttgcgcttgccggcggtggtttcctggatgcagttggccgccagcacggcgttggggccaccgcccacgttggtggcggccgtacagcccagcaggcggccttcctggccgttttctcccagcagcgtgttgaagttcgccaactggctgttggggtcgcgcagcaccagcaggtccacgcactgctgctggccgtcgggcacttcgcaggcgtcctggtcgaccaggccgtcgcgcgtggccgagagcaccttgaggcgatcggcaaatacctgttgcaggcagtgcgcgtcaccgcacaggtcgcgcgtatgctggatccagcgctgctgctcggcctgcagcttggccttgccggcggcatcgagggtgtcgcgtgcggaggcttcagccttggccagctcagcttcctgctgcaacagggcggggtcgttgcagatcagggtctgcacctgtgatgccccctcggcgcaggcagcgctgctgcccgtggccgctgccggggtgctggttgccttgccgtcggtgcttgcctggccggtgttcgctgccggcgcgctggcaccggcatcgctgccaggcgggctgcaggcggccagcagggccacccagcacaggatcatcaggggcttcatcgcccgggtcactcggtcattgttgcgcggcatgtcctgtcctttgctgtctgcgtcccggcgcatggcctgcagttggcagtccatgggggcatagagactagcaagcggcttcttagggcactgtgacagggcgcgcggatctgctgcggggcgacgcaacgcagaacgggcgcccgaaggcgcccgttctgtctgcatctgttgccggggtcagcgccctttcctgcggaaagggatccgaccccgcctgcgccggtagtgccggccgctggccggcaccgcgcacgatcagtagcggtagtggtccggcttgaacgggccttccaccggcacgccgatgtagtcggcctgttcctggctcagggtggtcagcttcacgccgatcttttccaggtgcaggcgagccacttcttcgtccagcttcttcggcagcaggtacaccttcttctcgtagctgtccttgttcgcccacaggtcgatctgtgccagggtctggttggcgaagctgttggacatcacgaagctcgggtggccggtggcgcagcccaggttcaccaggcggccttcggccagcaggaagatcgcattaccgttcgggaagatgtacttgtcgacctgcggcttgatgttgacatgcttgatgccggcgaaggacaccagtgcgtcgacctggatctcattgtcgaagtggccgatgttgcagacaatggcctggtccttcatcgcgctcaggtgctcgatgcggatgatgtccctgttgccggtggtggtgacgtacaggtcggcacggcccagggtcgattcgatggtgttgacttcatagccttccatcgccgcctgcagggcgcagatcgggtcgatctcggtgacgatcacgcgcgcgccgtaggcacgcagcgacgcggcgcagcccttgccgacatcgccgtagccacagaccacggctaccttgccggccagcatcacgtccatcgcgcgcttcaggccgtcggccagcgactcgcggcagccatacaggttgtcgaacttgctcttggtgaccgagtcgttgacgttgatcgccgggatcagcagggtgccggcctgggccagctggtacaggcggtgcacgccggtggtggtctcttcggagacgcccttccagtccttgaccacgcggccccagtaacctgggcgctccttggcaacgcgcttgagcaggttcttgatgacctgttcttcgtgcgaggcggacgcggtgttgacccagtcgctgccgttttccagttcgtagcccttgtggatcagcagggttacgtcaccgccgtcgtccaccaccagttccgggccggtcagggtgccgtcggccagggtgaaggtcagcgcgtccagggtgcagtcccagtactcttccagggtctcgcccttccaggcgaacaccggggtgccggtggcggcgatggcggcagccgcgtggtcctgggtcgagaagatgttgcacgaggcccagcgcacgtcggcgccaatgtccttcagggtctcgatcagcaccgcggtctggatggtcatgtgcagcgagccggtcacgcgcacgcccttcagcggcagctcggcctggtacttgcggcggatcgacatcaggcccggcatttcgtgctcggcgatgtccagttccttgcggccccagtcggccagcgtgatgtcgcggatcttgtaatcaccttcggtggagaaggtcttggcaacagcgttcattcgtgtgctccggttgtgggcgagcgggtgctcgcatctagccgggcgccgttgttacaaagccaccttaccgagcctggccgggcctcatcggatccggtcgcagcgcccctcggcaggggagaacccccattatatcgcggccccggcatgacatccggatgacccaaccatcggcagatgggggcgcgtgcacggcctgttaaggtcggtgctttcacgcatcacgcaggtagaacgatgagcatgcacgcgcgccgtacgcggcgctggaccggcctggtcctgtcgatgggactgctggccgtggccccgctggcctgggcggtggccccacagcccgctgcagcacaggcccagggcgtcaatggctacgaactgccctcggcggcgctgcaggcggtggtcgacgcaccgcgcgcgccgtcgctgcacctgtcgcctcgccgcgacatggccgcgttgatgcagatgccgtcgctgccgtcgatccgggtggtggcgcagccggaactgaagctggccggcctgcgcatcaacccgcgcacgttctccgacagccgtttcagcttcggcgagaagctgtggctgatgaacgtggccgatggcaaggaacggcagatcagcggcctgccggccacgctgtcgatcgccagcctgatgtggtctccggatcagaagtggctcgctttcaaccaggtcgacgccaccagcggcgccaacgaactgtggctggtggacgtggcctccggcagcgcccgccgcctggttgccggcctgaacacggtgatcggcagcggttaccagtggctgccggacagccgcgggctggtggtgttcacccgcccggccaacctcggtgcggccccggccaccgacggcatcccgaccggcccggccgtgcagcagacccgccggggcgatggcgtggtgtcgatccgtacctaccaggacctgctgaagaacgaggctgacgcgcgccagttcgactactacgccaccacacagccggtggaagtcagcctggatggcagcacccgcccgatcggcgcggccggcatcttcatgggcttctccgtgtcgccggatggccgcttcgtgctgcgccagccggtgcagcgcccgtattcctacgtggtgccggtgagcagtttcccgcgccgcattgaagtgatcgaccgtgccagcggcaagctggtgcataccgtggccgtgcgtccactggtggaaggcctgccgaccggcaacgacgccgaagtgaccggcgtgcgtgacatcggctggcgtggtgatgccgacgcgaccctggtctgggccgaagcgcaggatggtggcgacccgaacagggatgccaaggtgcgcgatgcggtgctgatgcaggccgcgccgttcgacacgccgccggtgacgctggcccagctgggcagccgcctggccggtatcagctggggccgtggcgacctggccctgctgaccgaatcgtggtggaagacccgcaggaccaagacctggctgatcgccccggacaatgccagcgccgaaccgcgcctgctgtgggatcgcgatgcgcaggaccgctacgccgatccgggccggccgctgcgggccagcgacgagcgcggccgttcgctgctgcagaccagcgccgatggcggcagcctgtacctggccggcgccggtgcttcgccggaaggcgaccgtccgttcgtggaccgcttcgacatcgccacgggcaaggcaacgcgcctgttccactcgcaggcaccgagctatgcgctgccggtggcattgctggacaagcagggcagttcgctgctgctgagccgcgagagcccggacgagccggccaacttctacgtgcagtcgctggccgatgctgggagcgcaccgcgcgcgctgacccatttcgcgcatccgctgccgcagctgaagggtgtgcagaaggagcagatccgctacaagcgcaaggacggcgtcgacctgaccgcgaccctgctgctgccgccgggatacgacccgaagcgcgacggcccgcgcccgctgctgatgtgggcctacccgggcgagttcaagagcgcggccgcggccagccaggtgaccgattcgccgtatcgcttcaatgcggtcagctactggggcccgcaggcgttcctggccaagggttacgtggtgctggccagcccgtcgatgccgatcatcggcgagggcgacaaggagccgaacgacacctacatcgaacaactggtggccaatgcgcaggcggccgtggatgaagtggtgcggcgtggcgtgaccgaccgcgatcacatcgccattggtggccattcgtacggtgcgttcatgacggccaacctgctggcacacacccgcctgttcaaggcgggcattgcgcgcagcggcgcctacaaccgcacgctcacgccgttcggcttccaggccgaggagcgcaactactggcaggcgcaggacgtctaccggaagatggcgccgttcaattacgccgacaggatcaaggccccgatcctgttcatccacggcgtggacgacaacaactccggcacgttcccgatccagagcgagcgcatgttcgcggcggtgaagggcctgggtggcaccgcgcggctggtgatgctgcccaacgaatcgcatgcctaccgcgcacgcgaatcgatcatgaccatgctggccgagagcgagcgctggctggagcagaccatcggcccggccgagcagggcacggcgaagaagaagcgctgatacgtgcatgagggtggccgctgcaacagcggccgcctgtgcggctgcgccgccgcccgagcatgggctcgggcgctacacggtgtcacgcgccatgacgcttgtagagccgagcccatgctcggctgcgtccgccatggatacgtgcagatgaaaccattcttgcatcgcagcacgacgcccgatctgggataggcttggggtctggatccgttgaccgaggcctgtgcgtcgccgatgaacgagtaccgcagcagcatcgagtttgcttcccccgatcttccgcttcgcgatgacgtgcgccggctcggcgcactggtgggtgacctgctggtcgaacaggtttcggccgcgtttctcgacgatgtcgaggacgtgcgcacccgcgccattgcccgccgcgagaaccaggcgccgctgtcggagctggccgaagggctggccgggcgcacgccgcagcaggccgagaccatggtgcgggccttcagcacctacttccaggtggtcaacatcgccgagcgcgtgcatcgcatccgccgccgccgtgattaccagcgtgccggtaccgccggggcgcagcccgacggcctgcaggatgcgctgcagcacctgaaggcgcagggcgtgggcctggatgagctggcgcagtggctgccgcgcatcgacatcgaaccggtgttcaccgcgcacccgaccgaagcggtgcgccgcgcgctgctggagaaagagcagctgatggtggccagcctggtcgacaacctcgacggccagcgcacgccgggggaagcggccgccgatgctgcgcgcttccgcatggcgctgaccgcttcgtggcaaaccaccgattcctcgccggtgcggcctaccgtcgatgacgagcgcgagcacgtcggcttctatctggtgcaggtgctgtaccgggtgatcccggtgctgtacgaatcgctgcagcaggcgctgcgcgatacctacggcgaagaactgccgctgccgcgcctgctgcgcttcggtacgtgggtgggcggcgacatggacggcaacccgaacgtggatgcccacaccatccgcactacgctggacgcgcaacggcaggccgtgctgggtcgctaccagaaggaactgctgcagctggccagcctgctcagccagtccaccgagcgggtgggcgtgagcgaggcgctgcaggcgcgcgtggcgcactaccagcagctgctgccgcaggtgcagtcgcgcccgcgccatgccgacatgccgtaccgcctgctcaacgaccgcatgcgtgcacgcctgcaggccacgttggatgacggcgaaggcgcctacgccggtccggacgaactgatcgacgacctgcagctgatcctcgacagcctgcgcgccaaccgcggcgaacatgccggtggcttcgccgtgcagcgcctgctgtggcgggtgaagaccttcggcttccacctggcgcggttggacgtgcgccaggaatcgagcgtgcacgcgcgcgcgctggccacggtgctgggcggcgacgcagcgtgggacggtctggatgccttgggccgcgcacgcctgctggcgccgcatgccagtggtgacgcgccgttgcggaagggcgacgacgaaggcaaccggcgactggacgccgtgttcgccgcgctggccgatgcccgtgcgcggcatggtggcgatgcactgggcagctacatcatctcgatggcacatgaccgcagcgacgtgctggcggtgctggcgctggcgcgccgtggcggcctggtggaagagaacggatcagtaccgctggatatcgcgccgctgttcgagacggtggaggacctcaagcgcggcaccgcgaccctgcgtgatctgctggccgacccgatctatcgcgcgcacctgcaagcgcgcgatgacgtgcagatggtgatgctgggctattcggacagcagcaaggacggtggcatcgccgcatcgcgctggggcctgcagcgtgcacaggtggaactgctggaggtggcggccgaggccggcatccgcctgaccttcttccatggccgtggcggctcgatcagccgcggtggcggcaagaccacgcacgcggtggacgcatcgccgcgcggcagcatcgatggccgcctgcgggtgaccgagcagggcgaggtgatccatcgcaagtacggcatccgtgcgctggccctgcgctcgctggagcaggccaccggtgcggtgctgcgtgccagcctgcgcccgcgtgccgccgagccgcgcgaggatgagtggcgaccggtgatggacgcggtggcatcggccagcagcgaggtgtatcgcgcgttcgttggccaggccggtttcatggactacttccgcaccgccacgccgatcgacgtgatcgaacgcatgacgctgggctcgcggccatcgcgccggctcggccaggacgccgcgctgggcaacctgcgtgcgattccctgggtgttcgcctggagccaggcgcgcgcggtgattcccggttggtacggcgtgggcagtggcctgcaggcggcggttgctgccggccacgaacggaccctgcgcgagatggcgcgggactggccgttcttccgcaccttcctggacgacatcgcgatggtgctgtccaagggcgatatcaccatcgccgagcagttttcgctgttgtcgggtgaactgcacgggcacttcttcccgcaggtgcagcgcgaactggaactcacccggcactggctgctggcgctgatggaccagcggacgctgctcgaccacgatgcgcggctggcgctgtcgatccgcctgcgcaatccctacgtcgatccgatcagcgtgctgcaggtggacctgttgcagcgctggcgggccagcgggcgcgaggatgacgggttgctgcgcgcgctggtggcctgcgtgaacggtgttgcgcagggcgtgcagaacaccggttgatccgcatccgccgggcatggcccggcgaattcgcaatggtagtgccggccgctggccggcaacctcatgatgtccggcagcacgcgcgaggttgccggccagcggccggcactacctcattcctccggtgacggcggattcgatgccagcagttccagatggcgctgttccatttcctggcgcagctggcggcggatctgcgcggcggcctggcggcgcttctcgtcggacgtcgccggctgcaggggcgggacgggcgtcggccggccttcctcatccacggccaccatggtgaagaagcagctgttggcgtggcgcacgctgcgcttgaggatgtcctcggccaccaccttgatgccgatctccatcgacgaggtgccggtatggttcaccgaggccaggaaggtgaccagctcgcccaccgcgatcggctggcggaacatcacctggtccaccgacagggtgaccacgtagctgccggcgtaacggctggcgcaggcgtaggcaacctggtcgagcaggcgcaggatggcgccgccgtggaccttgccggagaagttggccatctccggcgacatcagcacggtcatggacagctggtgggttttcagttcggtcgacatgcggcgattgtatcggcgtggcgtagctcttgtagagccgagcccatgctcggctgctcttgtcgcaggaaaaagaaagccgagcatgggctcggctctacagaaagcagaagggccgcgtgagcggcccttcgtgtttcttacttcagcttcgcatcggcgcgcagggcggcggcgcggtcggtcttctcccaggagaaggccgtggcgttgacggtctcgccttcgccgttgaggtagctgaactccttcggcttgcggccgaagtggccgtaggccgcggtctgctggtacatcgggtgcaccaggtccagcatcttgatgatgccgtacgggcgcaggtcgaagtgcttgcggatcagcttctcgatcttgtcgtcgctgatcttgccggtgccgaaggtggtgaccgagatcgaggtcggctcagccacgccgatggcgtaggagacctgcacttcgcaacggtcggccaggccggcggccaccacgttcttggcgacgtagcgggccgcgtaggctgccgaacggtcgaccttggacgggtccttgccggagaaggcaccaccaccgtgacgggcccagccgccgtaggtgtcgacgatgatcttgcggccggtcaggccgcagtcgcccaccgggccaccgatctcgaacttgccggtcgggttgatgtggaacttggtgcccttgtgcagccacttggccggcagcaccggcttgatgatctcttcgcggacggcctcgatgaggtccttctgcttgatgccgggggcgtgctgggtcgacaggaccacggcgtcgatggccgagaccacgccgttttcatagcgcagggtgacctggctcttggcgtccggacgcagccacgacagcggcgagttcttcttcttgcggatcttggcctgctgctcgaccaggcggtgcgacaggtggatcgcggccggcatgtagctgtcggtctcgttggtggcatagccgaacatcaggccctggtcgccagcgcccatttcttccggcttcttgcgatccacgccctgggcgatgtgcggcgactgcttgccgatcaggttcagcacgccgcaggtggcgccgtcgaaaccgacgtcggagctgtcgtagccgatgtccgtgatgaccttgcgggtcagcgcttccaggtcgatccaggcgctggtggtgatttcaccggccacgatggcaacgccggtcttgaccatggtctcgcaggccacgcgggcgcgctggtcctgggtcaggatcgcgtccagcaccgcatcggagatctggtcggcaaccttgtccggatggccttcggagaccgactcggaggtgaagagatagctggacatcaggcgtaatatcccttgattcggatggaaagatgggcgcgcatgatacacggggtgcgccgcctgtgcattgtgaacctgtgccggttgccggtggttaagcccgcgtaggcctggaggggccgtcccttggggattggggcccagccttgaggcccagtgttccaccagcgtgacaacagacgggacggctgccggccccgaccgcgcaggcggcgacctcgccgcgaaggcgggccggccgtcatcgttctgccccgaaaccgccatctggctgccgcctgccgggcgcaggctgtcggccaatccggccgccgggcatcagtggatccgccatgcaggaactcgaacagcgtctccagcaacgtttccccgattggttccatggccgtcgcggccaactggcgcggccgctgctgcgcagcgtcgggcgctggtcgcgcctggaccagatcgaagccttcctgcagcgcagctcaggactgcgcggcttcggtttcgtcgccgccggcctggaattcatcggcggccagtaccaggtggatccggccgcgctggccaggatcccggccaccggccgcctgctgatcgtcgccaaccacccctccggggcactggatgcgctcgcactgctggacgcggttggccgtatccgccgcgacgtgcggatcgtggccaacgatctgctgggggcgatcgcgccgctgcaggacctgctgctgccggtgcgcatcctcggtggcaaggcccggcgcggcagcctgcatgcggtggaggaagcattggccgccgagcagtgcgtgatcgtgttcccggccggcgaggtctcgcggctgtcgctgcgcggcatccgcgatggccgttggcagcggggattcgtccgctttgcccgcgcggccgctgcgccggtgctgccggtgcgggtggaagcgcgcaactcggcgctgttctacggcgcctcgaccctgttcaagccggccggcaccgcgctgctggcgcgcgaaatgttcgcccgtcgtggccgcccgctgcggctgagcatcggcgagccgatgcagctgggcaagggcggtgacccgggcgcacagctgctggcggtgcgccgcgcgctgtacgcgctgggccgcaacggcgcggccggcaatgccgctgcctgcgctggccccgagccattggcgtctccggtgccgccttcgcaggtcgccgccggcattgccgcggccacccagctgggccagaccgccgatggcaagcagatcctgttggcgacctgtaccgccgattcaccgctgctgctggaactgggccgcctgcgcgagctgaccttccgccaggtgggcgagggcaccgggcgcagccgcgacctggacgcctacgatccgcagtacgagcacatcgtgatctgggacgcggcggcgcagcgcattgccggtgcctaccgcatcatgcgcggcgcccaggccctggcccggcacggcctgtccgggctctacagcgcgtcgctgttccgctattccgacgatgccatcacccacattgccgagggcctggagctgggccgtagcttcgtggtgcccgattactggggcagccgcagcctggactacctgtggcagggcatcggcgcctacctgcagtgccggccgggcatccgctacctgttcggcgcggtctcgatcagcgcagcgctgccgcgcgatgcgcgcgagcagctggtggcctactaccagcgctactacggcggaaccgccgggctggccgaatcgaaccgccccttccagtacttcgccgcaccgccaagtttcggcgagctggatgcgggtgccgcgttcgatgtgctcaaggccaacctggccgcactgggtaccggcgtgccgacgctgtaccgccagtacaccgatctgtgcgaacccggcggcgcgcgcttcctcgccttcggcgtggacccggacttcagcgattcgatcgacggcctgatcgaagtggacctgtgcgcgatccggccgaacaagcgcaaacgctatctgcgcgacgcgggtgcgccggcatgagcacgctggcgaacctgtcgccgcaccggcgcgcagtgttcgtctccgacgtgcacctgggctcacgtcattgccatgccaccgagctagcgcggttcctctcgcagctgcgctgcgagcggttgtacctggtcggcgacatcatcgacctgtggtggatggcgcatcgccgcgccaactggcggcagtcgcacagcgaagtcatccaggccctgcacgcgctgcgccgtgcagggaccgagatcatctacattcccggcaaccacgatgcctcgctgcgccaggtgtgcgggctgatgttgccggccatgcaggtgcgccgccgtgccatccacgtgaccgccgatggccgccggctgctggtcgcgcatggcgacgactacgacggcgtgacccatttcggtggcctgcaggaaaagttcggcgactggctgtactaccgcatcctgaccggcaaccaggcgctgaacgcggtacggcgccggcttggcatgcgctactggtcgctgtcggagttcctgaagaagcgcagcggggccgccgaacgctacatcgagcgcttcgtgcaggccgggctggacgacgtgcgccggcgcggcctggatggcatcgtctgcggccacatccaccgcgcggcgctggtcgaacgcgatggcctggtctacgccaacgacggcgactgggtggagagcctgaccgcactggccgaggaccatgatggtgcgctgcgcctgctcgaccacaacggccagaccctggtggaactgccaggcgcgcggttgtcgcaggcggcataacgcgcgtctgtcctactgtagagccgagcccatgctcggctgacgtggcgccgaacgaagcgcagccgagcatgggctcggctctacatgcaccgcccgcaagccgctagcatcggcccatggactccctgacccagatcgtgctcggtggcgccgtcgccgctgccatcgccccgcccggacatcgccgcgcggccctgctcgctggtgccgcgcttggcaccctgccggacctcgacgcgctgtggctcggtttcaccgcagccgatccggtggcgaacatgatcgagcaccgcagtttcagtcattcgctgctggtactgccatgggtggcggcattgatctggtggctgttcaagcgcttcggcaatggccgcgtcgcgcagtcaccgctgcgctggttctgggcgatccagctggcgctggtcacccatccggtgctggatgcgttcaccgtgtatggcacccagttgtggtggccgctgcgcccgcatccgaccatgggatccagtgtcttcatcatcgacccggggtatacggtgtggcttctgctgggctgcgtgctggcctggttcggccgcgcccggccctgggcgggcaaggtgctgggcgtggccctgctgctcagcagtggctacctgggctggggcctgatcgccaagtcacaggtcgaccgtgccgcacagcagagcctggccgcgatgggcctgggcgatgcgccgcgcttctcggtaccgatgccgttcaacaccctgctgtggcgggtggtggcgatgacgcccaatggctacgtggtgggtgaccgctcgctggtggccgaccacgggccgatgcggttcgaaggccatgcgtccaacgtacaggccttgcgcgaagcgcaggccatcccggcggtgcagcagctgacgtggttcaaccgcggtttcatgcgtgcgcaggtggttgacggccggttggtgctgagtgacctgcgcatggggctggagccggactacaccttcaacttcgtcgtggccgggcaggccgacgggcagtggcgggcgatcgttcccgagcaggtgcgggtggattacagcagtcccgccgcgcgtgccgacgccggtcgccgcttggcggcgatgtggcagcggatctggcaggagccggcggcggcgccgggcgcggccgaccacaccgccgtgcattgatcactggatccacgcatggcgtggctctacgcccccgatcggcagcagaacaccggatcaatacaccgtggcgcggccctggacgaacgagtagaagaacacggcgttcgggtcgttctgcaccaggcggaactcgcggcgcatgccttccacggtttcctcgtccaccgagccggcctgcagcagctggtcggcggccgacagcaggagctgttcccagaacgcgatcatcgtcttgcgacgcgccggttcgcggttgtccaggtggatggtcttgatctcggtgtgcacgtcgcggaagccgccggccagcagcaggttgcccagctttgcaccgacgaacgggtcaccgccatggtcgtactggaagtcgttgaaggccatccagtagcgccagatgtgcggcgagtacgggtcgagcaggaacgaggcattcatcacttcggtgatgtagaccggtgaacccggtgccagcacgcggcgcacttcgctcagcacccgcgccggtgaaggcacgtgttccagcacccagcacaggaacgccgagtcgaagctgcgtgcctcgaacggcagctcgccggcatcggcctgctgcagggtgtatcggtcgctgcaccacggcgtgcgcgccaggttctcgcgcgcggtggccagctgcgtttcgctcaggtccacgccggtcacgtgcagctcggggaagcggcgcagcaggatctcggtctgcgcaccgacgccactgccgacttccagcaggcgccgcgcgccgctgtagtcgatctggccgaagatgctcgattccagcagccgggcctgggtcatcaggcgctgctgttcggtgccggaaaatccgtgcagataggtcggggaggaaatcggcggggtcatggggcgggctcttgtagcgtcgagcgtgctcgacggctctggaaattcagtcgagcaagctcgactcgacggcatggcagtacgctcaggcagcagatgacaacgcgggttccccggcgatcaggcggtcgaagtattccgtggtcagcgcgatctggccctgcgggtcttcggcacggttgaccaccgcgcggaacgcggcgttctccggacgatccttggcgtaccagcccaggtgcttgcgcgcgatgcgcacgccctgcggctcgccatagaacgcatgtagcgcgtgcaggtggccaagcaggatgtcgcgcacttccgccagcgacggcggtggcagttcctcgccggtggccaggtagtgcgccacttcgcggaagatccacggccggccctgcgccgagcgaccgatcatcaccgcatccacgccggtttccttcaggacgtaggcggccttctgcggcgaatcgatatcgccgttggcgatcaccgggatgcgcagcgcagccttgatctcgccgatggtggcgtactcggcctggccggtgtaatgctggtcgcgggtgcggccatgcacggccagcgcggcgatgccgctggcctcggcgatgcgggcgatcaccgggccattgcgatggtcgcagtcccaaccggtgcggatcttcagcgtgaccggcacgtccactgcgttgaccacggcttcgaggatgcgcgccaccagctgctcgtcgcgcatcagcgccgagcccgcccaggcgttgcacaccttcttggccgggcagcccatgttgatgtcgatgacctgcgcgccgtggtcgacgttgtagcgcgcggcctcggccagctgctgcggctcggtgccggcgatctgcacgctgatcggggccggctcgccgtcatggtccatgcggtggatcgactttcgcgtgttccagaagcgcgggtcgctgatggtcatttccgaggcggccagtcccgcacccagccgtttgcacagcaggcggaagggcttgtcggtgacgccggccatgggtgccagcacgacgttgggggcaatggtgtacgggccgatctgcatgcgcccattgtagggtgcgggcggcggtacggccgtgccgcgcgcggtccggttcaggccgatcggcaccgacctcatgccgtaccggcatcagcagatgcttgacggttgcttccgtcgcccccacgggcgggcgatggtgggcggctaccccaggctctgccaggcctggcgggtacccagcgcgaaggccagccccaggcccaggcagaccagcgagctgaccgcccagaagcgcgtgccgttgtaccccggccggaacagcgccaggccgaagcccatcgcggcacgcagcaacagcagcgcggcgatgccgggcaggaccaggcggctggccggcagcggcgaatgccagcccgcggcggccagtgcgtacagcgtccaggccaccagcacggcagtgatgaccgcggtcatcagcggtggccaccagtgccccgcatgcgccagccggaccacgcgctggccggcaccgaagtacctgtaccacgcggcgccgaaggcgatgcagccgatatgcagcagcgccgccacggcactgccggcggccgcgaccagcagccaggggaatccgtccatgtcctgcccgtgcgaggaagctgcgcggatggtgggcgaggggcaggatgtgggcaatgcgacaggcggtcgcaggggctgggcaatgggcaaaagaatggcccgggtgtctgcacacccgggccttgtcatccacgcgtggcgtggaattacctggcttcagcgtcggccggggtgaagcgcggcatcgccgcagcggcgccttccttctcggtcgaacggccggcgaactggttggcgaagcgcacgtggcgggcgaacggggcgtcggccacctgcgccagcgacgcggccagcgcaccgttgaaggcgtcaccggcaccggtggtgtcgatcgcctgcacctgttcggcacccacgcggtagtacggctgggtatcgccgcgcaggttctcgtcggcatgcgacacgaacacgcccaccgaacccagggtcaccaccacggtgccgttgccgaccagcttgcggcacagcgcgtgcaggctggcgccatccagcgcggcgacgtcgttggcatccacgcgctcaccgacatggcggccgagcagggcagcgaactcggtttcgttcggggtgatcacatcggccagcttgagcaggccgatggtcgagggcgcatcggccggtgcggtattgagtacggtggtgacaccggcctcgcgggccgtggccagcgccgcttcgatggtctgcaccggcgattccagctgcaccagcaccaccttggcgcgggtcagcagggcctgctgctgttgcaggaaatcggtgcccagcgcggcgttggcacccgggccgatcacgatggtgttgcggccacgcgcgtccacgtagatgcccgcggtgccggtcggttcgctgctggcctcggcgatcagcgcgaagccatcctgcgcagccagttcacgcgcggtggcgccaccggcgtcatcgcccaacgcgcacacgaagtgcgtgtcggcaccggcgcggcaggccgccaccgcctggttgaagcccttgcccccggggccggtgctgtagcggccggcaatggtcgcacccggtgccggcagcgactcacaccgccacacgtgatcgacattgaaggaaccgacgacaacgacactgctgctcatagggaatcttttctcaaccaagggttcaactgaagtgcgtcagcacgccggcgatggtcgccgtcatgaaggtggcaatggtaccgcccaacaccgcgcgcaggccgaacttggccaggtcgtggcgacgttccggggccaggccgccgatgccgccgatctggatcgcgatcgagctgaagttggcaaagccgcacagcgcgtaggtggcgatcaggcgaccttcctcggacaggctcacgccggccacctggccgttcacgatctgcgacagttcggtgtaggcgacgaattcgttgatcacgaccttctggccgatcagcgaaccgacggtggtggcatcagcccacggggtaccgatcacccaggcgatcggggccagcacgtaaccgaagatggtcgacaggttggtcggcttgccgatggcagcggccaggccggtcacctcgccgatccaggtcaacggggcgttcagcagcgcgatcagggcgatgaaggccagcagcatcgcgccgatgttcagcgccagcttcaggccgtcaccggcaccggcagcggccgcgtcgatgatgttgctggaggtcttttcgacttccatcttcaccgtgccgcgggtcagcggggtgccggtttccggaatcagcagcttggccacgaccagggtggccggtgcggccatgatgctcgctgccagcaggtgcttggcgtagaaggcctgctgcgccgggtcgccaccgccgagcatgcccacataggccgccagcacgccgccggcgatgtgggccatgccgccgatcatcatggtcagcagctcggactgggtcatcctggcgatgtacgggcgcacggtcagcggcgcctcggtctggccgatgaagacgctggcgcagacgctggtggtttccgcgccggacacgcgcatcaccttggtgatcgaccacgccatcacgcgcacgatcgcctgcatgacgttgaggtggtacatcacccccatcagcgccgagaagaagatgatggtcggcagcacctggaaggcgaagatgaagccgtagttcttggtgtccatcaacgagccgaagatgaagcccgagccttcgttgacgaagctgagaaccttgacgaagcccttgcccagcgcatcgaacacgtcgcggccgcccggcaccaggatcaccagcgccgcgaacgcgatctgcagggtgataccggtggcaaccagcttccagtcaaccgcacgcttgttgttggaaaacaaccaggtgatgccgatcagcaccgccaacccgaacaggccgaagccgatcctgcccaaaccttcgaccatgtgagtgactcccctggggcgtcgcgaaaaacgggaagcctagtgcagggcaggggccggggcaagaaaaagcagcgtgcgcgcatctatcggtaccgatcaggccagcaacggcaagggcttgcggccggcggcggcaggtagaatggggctcgatcccggcccggatgcgggcccgcagcaggagattcgcatgcaataccgtcgcctgggctccaccggcctgccgatttccgccctgtccttcggcgcctgggtgaccttcggtgaccagatcccgcgcgacgaggcccgcaacctggtggccgccgcctgggaccacggcgtcaacttcttcgacaacgccgagggctatgccaacggccgcgccgaacaggtgatgggcgatgtgatcgccgacctgcggctgccgcgcgacggcatctgcgtctccagcaaggtgttcttcggcagcgccaaggacccacggccgacccagcgcggcctgtcgcgcaagcatgtgaccgacgcctgccatgcggcgctcaagcgcctgcgggtggactacctggacctttattactgccatcgcccggatccggacgcgccggtcgccgagaccgtgcatgccatggataccctggtgcggcaaggcaagatcctctactgggggacctcggagtggtcggcggtgcagatccagcaggcgctggacatcgccgaggcgcgcaacctgcagggcccgtcgatggagcagccgcagtacaacctgctgcaccgcgaacgggtcgaggtcgagtacgcgccgctgtatgccggtgccggcctgggcaccaccatcttctcgccgctggcctcgggcctgctgagtggcaagtacgaccagggcattccggccgatgcgcggctgggccgcgagggcatggaatggctgcaggcgctggtgctgggtgacgacgccgaggcccgcctggcccaggtgcgccgcttcagcgaggtggcgcgtgcgctggggcaggcgccggccacgctggcaatcgcctggtgcctgcgcaacccgaacgtctccagcgtgatcctcggtgccagccgggtcagccagctgctgcagaacctgcaggcgctggaggtgctggagcaggtcgacgccgccggctgggccgacgtcgaagccgccttcgcctgaaccccggggccgaccgggcctcgggggcgtcgggggcctcggtagagtcgactctatacggctgggtcgccatttgattgacaggatctatcgaatttgagaattcgatcattaatctcatcaatcaaattgagaatggttgttgattgtcaactgagaatcattatcatttgactcgtccctcgcacgagtccagatgctcatgaatgctcaacctgtactgctgcgccccgaaacgctgaccctccgcgatcgtccggtccgtgtcgttccgccggaagaggtcatcgacagcgaagccctgctcaagggccgtcgtgaaatcctgatccagcacggcgaccgcttctatcgcctgcggcacaccagcaacgacaagctgatcctgaccaagtaatcgcggcctggtcgcccgcccccctccctcctgccggccgcgccggcagggtgggcgacccgtccgctcccgctctctccccctcggtctaccgcgtgcaccctccgggtgtgccggtaaccgggggttcccctgcctgaccgaacgaacccgatgacccgccctaccgccctttgccttgccgtctggatggccctgccgctgtctgcccatgctgctgccgcggccaccgccgcgcccgatgcgcgcgaattcgaccgtgtgcaggtcaccgccacccgcaccgagcgggcggtgagcgatgtggcggccaccgtggacgtcatcgaccgcgagcagatggaccggcacctggtgcaggacatcaaggatctgctgcgctacgagccgggcctgtcggtcagccgcagcgccgcgcgcttcggccttggcagcatccgcatccgtggcctggacggcaaccgcgtgcgcgtgcagaccgacggcatcgccatgcccaccagcttcaacatcggctcgttctccaacgccaaccgcaacttcaccgatctggatacgctcaagcgcgtggagatcgtgcgcggcccggccagctcgctgtatgggtccgacgcgctcgggggtgtggtcgccttcgtcaccaaggatccggccgactacctcaaggatggcaaggacagctacgtcggcctgaagttcggctacgacggtgagtggaagggcctgctcggcggcgtgaccagcgcgttcggcggcgaacactggagcggcatggtcaacatcaaccatcgccagggccaggaaaccggcaataagggtgatgtacgcagcctcgacaacacccgcaccgcgcccaatccgcaggaccgcgatggtcgcagtggcttggccaagctggtctatgcgccgagcgaggaccagcgcttccgcctgaccgtggaaggcaacgaagacaacaccgataccaacgtgctgtcctcgatcgaccgcaccaccaccaccggcatgaaggcgcgcgatacgcagaaccgcacccgcgtgtcgttcgcccatgaaatggatgcgctggacaagggcttcgccgacagcctgcattggcagctgtatacccagcacagcgaaaccacccagatcacggatgaggaccgcgccaaccgcagccgccgccaccgcgagttcaacttcgaccagcgcgtctacggcctgcaggcgcagttcaacaaggcgttcagcaccggcagcgtcgaacacgcgctgacctacggtttcgagggcgcgcataccgagatccgccagaagcgcgacggctaccaggtgttggccaatggccagaccagcaccaccatcctgcccgacgccttcccggtgcgcgatttcccgatcagcaagaccaccgagctgggcctgtacgcacaggacgaaatgcgcatggccaacggcaagctgtcgctggtgccgggcgtgcgcgtggaccgctacgagctgaagccggaggtggacagcatcttcgccgacgacaatcccggcgttgcggtggccaggctgaccaagaccagcgtctcgccgaagctgggcatggtctatcgcttcaccgacgaatggtcgctgtttgccggctattcgcatggcttccgctcgccgccgtacaacgacgtcaacctgggcttcaccaacttcgccttcggctacaccgccattcccaatccggacctgaagccggaaaccagtgacggcatggagctgggactgcgcttcctgtcgccagcggcctacgtcagcctcagcggctactacaacgagtacaaggacttcatcgagtcgcagtcgctggtcggcaccaacgcccagggcctgatggtgttccagtcgcgcaacatcgcggatgcgcgcatctacggtgccgaaatgaaggccggcgtcgacttcggccagatcagcccggcgctgcagggctgggcgctgcgcagctcggtggcctggtcgcgcggcgacaacaggaccgaagacaccccgctggattcggtcgacccgctgcgtggcaccgtcggcctgatgtacgacaccgacacctggggcgtcgaactggccggtaccttcgtcaagcgcaaggaccgcgtcaccgccgccacggtgtaccgcccggccggctacggcgtggccgacctgatggcgcactggaacttcgccccgggcgccaccttcaacgtcggcgtgttcaacctgggcgacaagcgttacatcgactggtccaacgtgggttcgacgctgtcgccgggcagccgcgtgctggaccgctataccaacccgggccgcaccctctccgccagccttgccgtttcctggtgacctcatgagccgagccttgtccgcacgcaggaacgacgccatcgccgcgcagggcagcgcggcctggccgacgccggcacagctggccacgctcggcaccgtgttgtgcctgtaccgcgccgacggcaacgagctcggtggctggcgccaggcagtacgcgtgcatgcctgccagggcgtggacagcgagggcgtgcgcgaaagcctgtgcttcctcgatgcccgcggccgctgcgtgtggcggctgtacctgttgcccgacagcgatttcctggcctgggaccggctggtcgcggcgctgccgccgggcccggagcatgacagcgagggcagtgtcggcgaacgcctgtggcggcgcctggccggccatctcggtggccagcgctggcgactgtgcgcgctgcgcctgcatgccgccgacgacggccgcaccctggctgcaagcctgtcgacgttgtcctcgctgggcgcagccaccgcgcgtcgcatcgcgcggctggaaggtgccgaaggcgagctggcgatcgacgattgctgctgcgccgatgctgcacgtcgctcggcgccgcgggttcccggcgacctgccgctgatccggctgtaaccctttcccgatggaacgcctgccggccacggacggcctctcactgcatctgcaaccccgaaggaagaccccgatgaagctccagacagccagcgtcctgctgctgctcgccaccagcggcgtggccagcgcgcagccctccggcatcgcccgcgaccacgacagcatccttgccatgcagggcgagtacaccgtcgatttcgcattcgacgagaccgtgcggctgaagcccggctacgagcgcgccccggcgatgcgcagcggcggcaacgaactggtgatcgtggtcgaggacacgccgaagcgcatcgtgctgcagcacctgctgctggacgagaagagcggccacatcaccaagcactggcgccaggactgggtctacgaagcaccgaaccgtttcgagttcagcgccgaccagacctggcaggtacgccgcatttccgcagcggtgaaccagggcgcctggacccagtgcgtgtacgaagtgagcgacgcaccgcgctactgcggcaccggcaaatggacctacaccaacaacgtgccgagctggaccagcgacctcagctggcgcccgttgccgcgccgtgagtacaccaagcgcagcgactacaacgcgctggccgtcgtcaaccgccacacgctcacgcccaatggctggacccacgagcagttcaacaccaaggtgcagcgcaacgccgacggcagccaggtggagatcgcacgcgagttcggcttcaacgactacgtgaagaccaccgaggtcgacttcaccccggcgcgtgactactggaaggccactgccggctactgggccaaggtgcgccagcgttgggacggcttcctcggccaggccccgggcgtgcacctgaagaccaagatcgatggcatggcgatgatcattccgctgttcacccaggccgaagcgatccagtccggcaaaaaggtgaaggacaagcagatcgacgaggtgttcgccaagtacgtggaaaaggcgccgaaggaaggctgatcgccgcgatggagagaggtgccgggggtacccggcaccgcattcaccggctgccggtgggggccgggcttgctcggcacgccatccggaggcgcaaccgattcaggcctcgcgcagcgccaatgccggcggcgtatgcaggatcgcccgcgtaccccaccagcccgccagcagactcaagccgatgccgaccacgccgccgatcagcaggcccggccacggcggcagcaagggcagctcgaacaccttctgcgacaccgccacgccgatcgctgcggccgcgcccaccgccagcaacgccgccagcgtgcccagcgcgccgaactccaccagcaccgcgccgcgcagctggcgccgggtcgcgcccagcgtgcgcagcaccgcgctgtcgtagcggcgctcgccggcggtggcctgcagcgccgccagcagcaccagcacgccggccagcaggctgaacaccatcaccagctgcactgcctgcgccacgcgctccatcacatcgcgcacctgcgagatcaccgcgtccacgtccagcagcgacaggttcggctgcgcgcgcaccagctcgcccagcccggccgcgttgccggacggcagatggaaggccgacagcaggttgtgcggggtatcgcccaccgcattggggttcaacagcacgaagaaattcgggcggaatgtgttccagtccgccttgcggatgctggtgacggtgaactcgcgctgctgctcgcctacggaaatcgtaatgcgatcacccaggtgcgcgccgtagcgccgcgcccagccggtttccaccgaggcttccgccgcggtgctgccggcctgccagaagcgaccctccagcagcgcattggcgggtgggaagctgctgcgccagctgaagttcagcggccggttctcgtcgtcgtcctcgcgcgggccgttgttcgcgccgttcccctcggcggcggcctggtccacgcgcagcggcggcttgccgttgatcgcgatcaggcggccggtcgccatcggctcgatactggcgtcgccggcgcccagtccacgcaatgcggccagcacaccgtcgcgttgttcgggctggatgttgatcaggaagtagttcggcgtatccgcaggcaggcgctcgcgccactgctgcagcaggccgggtccggtcaccgccagcagcaacaacgcgcacagcgacagcgacagccccaccagctgcatcaccgccagcagccggcgccgggtcagcgcggccaggcccaaccgccagttgccatgcaggcggtgctgcaggccgcgcagcagctgcagcagcacgaagccgaccgcaccggccgccagcgccagcgcggccaggccgcccagcacccacagcgccagtttcagatcgccggtgacctgcaccgccagcagcaggctggccgccagcgccgccacataggccagcagcgacgccggcggcagggcggcgaaggaacggttgagcacccgcatcggcggcaccccgcgcaggcgcagcagcggtggcaggccgaagccgaacagcagcagcaggccgatgccggcaccggtcagcgccggcatcgcttccggcagcggcaggcgctgcggcaccaggctgcccagcaactgcaccaggccttcctgcgcggccatgcccaggccgatgccgagcgcacaggctggcaccgccagcatcagcagctgcagcgccaggcccagcaggatgtcgcgctggcgtgcgcccaggcagcgcaggatcgccacctggtcgatgcgacgcagggcgaagcggttggccgccagcgcggtggccacaccggccagcagtaccgccagcagcgcgctcaggccgaggaagcgcccggccagatcgaatgcctggcgcacgccacgctgggtgtcgtccacgctcagcaggcgcaggcctttcacctgcggcagcagccactggcgcagcgccgcgatcggctccgctgcgccggcgaacatcagccggtagttgatacggctgcccgggccgagcaggccggtgccctccacatcagcgcggttgaccagcagggtgggcgagagtgtcagcaggtcgccaccgctgtccggctcggcctcgatgatgccggcgatgcgcagcgtgccggcgccgaactcgaggtcatcgccggccttcagccccaacccctgcagcaggcgtgggtcggcataggcctggcccttgggcggcatgccggcatcggcgatcaacgcaccgccgggcgtggcccggacccgcagcgtgccgcgcagcggataacccgcctgtaccgccttgatgctggccatctggctggcatcgccgttgaacagcacgctgccgaagctggcgatgcgggtatgcgccaggccgcgctgttgcgcctcgtcggcgaatgcctgcggcggatcatcgcgcccggcgatgccgaggtcgccgccgagcatttccgccgcgctgccggtcagcgccaggttgacccggttcaccagcgtgcccaccgcagtcatcaccgccacgcccagcaccagcgcggcgaacacggtcagcaggtcgccggccagcgcctcgcggcgcagcgcgcgccacgcgtggcgcagcacgttcatgcctgtgccccacgctcgaccggcagcaggcggccgtcatcgatgcggtggatgtactggcaacgctgggccaggcgcaggtcgtgggtgaccaggaccagggtggtgccgctgccggtgttgagttcgaacagcaggtcgctgatgtgctggccggtggcatggtccagcgagccggtcggttcgtcggcgaacaggatgcgcgggcgggtgacgaaggcacgtgccagcgccacgcgctgctgctcgccgccggacagctggcgcgggtagtggcgggcgcgatgggccaggccgacctgcgccagcacctcgtccacccgcgcgcggtcctcgcgtccggccagttccaacggcagcgcgacattctcggcggcagtcagcgccggcagcaggtggaagctctggaacacgaagccgaccgcgcgcgcgcgcagctgggcccgtgcttcttcatccaggtcgcccaggttctggcccgccagcgcgacgtggccgcggctgggcaggtccagtccggccagcaggccgagcagggtggtcttgccggaccccgaagcgccgacgatggccacactggtgccttcatggacggtcagggtgatgttgtccagtatgtggacttcaccctccgggccctgcacggacttgccgacctggtcgacggcgatggcgacgggcgtgctgcggggggacaggctgtcgatgaggagactccaatgcgcaagacgggatggagccggcgagccggcgcgatgatggtgctgctgctgggattgctgctgcccgggctggccggagccaaagacccggcaggtacggtgctggtgctcggcgacagcctcagtgctgcccacaatatccctgccgacgccggctgggtcagcctgttgcagcagcgggtcaggcaacagtcgaaaacaccggcgcgcatcgtcaatgccagcatgagcggggaaaccacggccggcgcgctgacccgcctgccgggcctgttggcgaaggaaaagccgacggtggtggtgatcgcgctgggcggcaacgacgcgctgcgcgggctgaccccggcacaggtgcagggcaacctggaaaagatggtacaggccagccagaaggccggcgccagggtgctgctgctgggcatcgacgtgccgcccaactatgggcccgcttaccgccagcgcctggcggcggcctacaaggcgctggccacgcagtacaaggtgccgctgctgccgttcctgctggagggcgtggccctgcagccgggcatgatgcaggccgatggcctgcaccccacggcgcaggcgcaatcgagggtgctggacaacgtctggccactcctgcggcccctgctctgaacgatttacaaccctcttgacggaacttcacatcgcgtccaccgtcgatccggcatgtttcacaaagctgaagttagagggaatcacatgcgtcagacgaaggagacctccggcttggtgctggtggtcgaagacaaccgcaacatctccgagatgatcggggaatacctggaaggtcgcggcttcgaagtcgactatgcacaggacggcctggatggctaccgccttgcggcggagaacagctatgacgtcgtggtgctcgacctcatgttgccgcgcctggatggcatcgaagtatgccgtcgcctgcgcaacgatgcgcgcaagtccaccccggtgctgatgctcacggcacgcgacacgctggacgacaagctcaccggcctcggtttcggcgccgatgactacctgaccaagccgttcgcgatccaggagctggaagcccgcctgcgcgcgctgatccgccgcgaacgccgccaggtgggttcggaagtgctgaaggtcgccgacctggtgctcgatccggtcagcatgcgggccacccgtgccggtaccgaactgcagctgtcgccgatcggcctgcgcctgctgaccatcctgatgcgcgaatcgccgcgcgtggtcacccgccaggagatcgaacgcgagatctggggcaatggcctgccggattcggacaccctgcgcagccatctgtacaacctgcgcaagatcatcgacaagccgttcgaccgtccgctgctgcacaccgtgcagagcgccggttaccgcattgccgatatcgcccagccgatggcctgatcggggccaggccggtgcagcatcaggcccggccgggcaacgacccccgcaccgggcacggatgaccggccagcactgccgccggtcatcctccgtgcacgactacggcgcagcgcgctgcctataatcgcagcgctctgaccgggaccccgcaatgccgcacggcctgccgcgcaagatccgtatcgccttcatcctgcaggcagtcctggccagcctgggcatcctgctcggtgcctggctggtttcgctggtgatcaagcacagcctggtcggcgccgccctgcgcgaggaagcggcctattactggacgctgcacgaggcctcgccggtgcagccaccgcccaacacccagaacatccgcggctacctgctggaaagcgggcagtcggcgctgtcgttgccggccaacctgcgcaacctggaacccggtttccacgagctgcccaaggatgaccagctggtactggtcgatgtgcgtccggccggccgcctgtacctggtgttcctgcgttcgcgtgcggagatgctggcgttctggttcggcatcgtgccggtgctgctgaccctgttggcggtgtatggcgccagctgggtcacctaccgggcctccaagcgcctggtgtcgccggtgaactggctggcacggcgcgtctcgcgctgggacccgggccacccggaggcggccgacctggaaccgaacaagctgcccgcggacatgcagggcgagacccggcagctggcggccgcgctgcattcgctggccaaccgggtcagcgcgcacgtggcccgcgagcgcaacttcacccgcgatgcgagccacgagctgcgcacgccgttgaccgtcatccgcgtggccagcgacatggccctgggcgatgaaaccctgcagccgcgcctgcgccgcagcctgcagcgcatccagcgcgccggccgtgacatggaagcggtgatcgacgcgttcctgatcctggcccgcgaggccgacgtcgaaccccagatcgagctgttcgacgtcaacgacatcgtccgctacgaggtggacaacgccaacgaactgctgggtacgcgtctggtgtcagtgcacctgcacagcgaaggcccggtgcagctgcacgcgccgccgcgggtgctgcaggtggtggtcagcaacctggtgcgcaacgcctgcagctacaccgacgaagggcgtatcgacgtgcacgtgctcaatgaccgggtggtggtgcgcgacaccggcatcggcatgtccgccgaggcgctgtcgcgcgcgtttgaacccttctaccgcgccgagccgagccgcccgcagggcaccggcctgggcctgtcgatcgtgcgccggctgtgcgaccgcttcggctggaaggtcagcctggccagccagccgggcaagggcaccgaagccacggtggtcttccggtaacgcggcgatctgccggggtcggatcccgttgcggcgcaaccggctctgaccccatcccgctgaaatgtcggtagatccaggccatgcgtggatggggtgcggtagcgccgggccatgcccgacgtccacagtgccttagttgcagttgaccttcggcgccagcgccttggtccagatcgcatagccggccggggtcatgtgcagcatgtcctcgcggaacagcgtcgcgtccggctgtccatcggcgccgagcatcggcgtgtagatgtcggtgaagccggtgttgggcagcctggccagcgcagccttgatcagcgcgttggcttcgttgatcgccggcagcaggtgcgcacgcgacgggctcggcttgatcgacaggtactcgaccctggtcttcggcaggtcgcggtgcacgcgctgcacgaaggcgaccacgtcatctcgcacctgcatggcgctgcggccgctgttgaggtcgttgtcaccggcgtagaagaacaccttgcacggcgcatacggcaccacgatctggccggcataccaggtgctgtcgcgcacttccgaaccgccgaagccgcggttgaacaccggctggccggggaagtcggtggccaggctctcccagaagcggatcgaggagctgccgatgaactcgatgccaccacgcggcggcgggttggcctggtcggcgctggcgaagcgggccatgtcgccggcccaggccacattggagacctgttcgggcacctgcggcggcctggccgggctcagggcctgggcaagcggtgcggcagtcagcaggcccagcatcagcaggcaggtacggcgacgggacatcaggcgctccagcaggcaaggggagctccatcatagaagcacggcccagcccggtgcttgcccctggcaggccgttcagcgggccggtgcggggtgcggttggcggccttgtggcaaaatggcggccatctgcctattcctgtgcacccatgatttcctgccgtgcgtctgagcggtcgctgcgccgcgcccctgttgctggatgttccacccgtggctgatcagttcggccacatgccccgcggcccgcgccgcatcttccaggccgcccgctggtcctggcagggcctgcgcgccgcctggctgcacgagtcctcgttccggctggaggtatacctgctggtgatgctgactccggtcgcgatctggctgggccagaccccggtcgaacgcgcgctgctgatcggctcgatgctgctggtgctggcgatggagcttgccaactcggccatcgaagcggtgatcgaacgctacggcagcgagatccacgagctggctggccgcgccaaggacatgggctcggcagcggtgttcgtgctgatgatgaacgtgctgctgtgctgggcgctggtcgtggttccgcacgcgctggccggcagctacggctgaaaccccattcccccactgccttgaagagtttccatgtcctttgagttcctcgccgaccccaatgcctgggtgaccctgttcacgctcagcgcgctggaaatcgtgctcggcatcgacaacctggtgttcatttccatcgcggtcagcaagctgccggaagagcgtcgtccgttcgcacgcaagctgggcatcgcggtggcctgcatcacccgcatcggcctgctggtctcgctggcctacctggcgcacatggcggccaacctgttcaccgtggccggcatgggcatttccatccgcgacctggtactgatcgttggtggcctgttcctgatcatcaagggctgcatggagatcaaggaactgatcagcggtggcgaggacgaagaccccagcaccaccaaggcctcggccgtgttcggctacgtgatcgcccagatcgcggtgatcgacatcgtgttctcgctcgactcggtgatcaccgccgtgggcatcgccgaccacatcccggtgatggtggcggccatcctgctgtcggtgctggtgatgctgctggccgccaacccgctgggccgcttcatcgacgccaacccgaccgtgaagatgctggccctggccttcatcctgatgatcggtgcggtgctgatcctggacggcctggacgtgcacgtgcccaagccctacatctacgccgcgatgggcttctcggtgctggtggagtggctgaacctgctgatgcgccgccgcgcccgcgaacacaacgtgccgggcgccggcaactggtaagcgcgccattggcacgtgtgtcacccagaacccccggcctggccgggggttctgcgttgtggggcgcggctctacaacgaacggcgctgcggtttttgcacttgcggcggcgttccggcctccacttgtgaatcaggatcaacagtgttttcccgggccgaggcttaatccggcgcagcaaagcgcgcaggctacgcactcccgattcccgccccccaggaaacccccatgaattccagagccgccttgctggcgcttgccgttggcgccttcgccattggaaccaccgaatttgccccgatgggcctgttgccggtcatcgccgacggcgtgggcgttggcatccccaccgccggcatgctgatcaccgcctacgccgtgggcgtgatgctgggcgcgccggtgatgaccctgctgatgggccgtttcggcaagcgcaccgcgctgatgctgctgatgtccatcttcgtggtcggcaacctgctgtccgcgctggcgccgaactacgggctgctgctgctgtcgcgcctggtcaccagcctcaaccacggcgccttcttcggcatcggtgcggtggtcgccgccagcctggtgccgaaggaaaagcaggctgccgccgtggccaccatgttcatgggcctgaccatcgccaacatcggcggcgtgccgctggcgacctgggtcggccagcagctgggctggcgcctgtccttcgccggtactgcggcgctgggcctgatcgcaatcaccgcgctgggcttcgcgctgccggcatctgcaccggggccgcgcccggacgtgcgccgcgaactgaaggcgatcctgcagccgccggtgctgctggcgatggccaccaccgtgctcggcgccggtgccatgttcaccctctatacctacgtcgcaccggtgctgaccgaattgaccggcgcctccaataccttcatcgcgatctcgctggcgctgatcggcatcggcttcaccctcggcaacggcatcggtgggcgcatggccgactggtcgctggatggcgccacacggatcctgctggccgtcctggcggtgctgatgttcgtgctgccgctggccttcatgagccacgccaccgccgccctcggtgtgctgctgttcggcgcggcgaccttcgccctcgtaccgccgctgcagatccgggtgatgcaggcggccagcgaggcgccgggcctggcgtcgtcgatcaacgtcggtgcgttcaacctgggcaatgcggtgggtgcggcgctgggcggtgcggtgatcagctcgggcctgggctatgccgcgattccggtggccggtggcctgctggcggcatcgggcctgctgctggcgtggctggggcgtccccgcactgcggtggctgaggcctgctgaggggagagggtttacggcagggcttgcagccctgcacccgccgaatcaacgtcaacgtcaacggcaaaagcctgcattccgtgggttggcggggtgggtccggttgagggggacgctgcaagtacgtccatgtaagctcggtcgccgcatccacgcggctcacgccccctcaaccggacccaccccgccttcgacagattcccgcgatctgtcgtaacggcgttccgctctggtaggtgtcgaccttggtcgacacgaatgcctgaagaaccggcttttgcttttcattttttcttttgatcctcccgcggtgcgcaggaaattgtccgtggccgggagggtgggttggctgggggcgtgagcgccatggatggcgcgaccgagcctacatggacgtattcacggcgtcccccagccaacccaccctcccggccaaccccgatatccagcaaacacagcaccgcggagggggcggtgcccgatggccggtctttcacccgaaccgtggcatgctcggtgcccagtccacccggaacctccgccatgcgcctgttcacccgtgtcctgcccctgatgctgctggcctccctgctctccggctgcggctacaacgccatccagcagaaggatgaggcggtcaaggccagctggtccgaagtgctcaaccagtacaagcgccgcgccgatctggtgcccaacctggtgcagacggtgaagggttttgccagccaggaagagcgcgtgctgaccgaagtcaccaacgcccgttcgcgcgtcggcgagatcaacgtcaacgccgacgacgaagcctcgctcaagcagttccagcaggcccagggtgaactcggcagcgcactgtcgcggctgctggtggtcaccgagaactacccggtgctgaagtccgaccagaacttccgcgacctgcaggcccagctggaaggcaccgaaaaccgcatcacggttgcgcgcggccgctacatccagcaggtgcaggactacaacacctacatccgttcgttcccccaggtgatcaccgccaagatcttcggctacaagaccaagccgaacttcacggtggacaacgaagcgcagatttccaacgcgccagcggtcgatttcggcaacgcgccgcagcagcagccggcgccgcagccgggtcactgaccgatgcgcctggccactgcgctgctggccctgctgctgtggctgccgttggcaacgcaggcacagccgctggcgccgattcctgcgctggactcgccggtggtcgataccaccggcacgctggacgccgcgcagaagcaggcgctggtgcagcaggcgatcgagctgcagcagcgcaagggcagccagctgcaggtgctggtggtgcccaccacccagccggaggacatcgcgcagtacaccacgcgggtcttcgatcaatggcagatcgggcgcaagggcgtggatgacggcgtgctgctggtggtggccaaggatgaccggcgcgtgcgcatcgagccgggctacggccttgaaggcgcgattcccgatgccatcgccaaccgggtgatccaggaatacctggtcccgcgcttccgcagcggcgactatgccggcggcatcaccgatgccatggcggtgctggtcaagctgatcgacggcgaaccgctgccggcaccggtcagcggccatcgcgggcgcgagcccggtggtggtggcgatacctggttcctggcgctgttcatcggcgtgttcgctggcagcatcctgcgcggggtcttctcgcgcgtgccgcgtccgctgcgcggcctgctcggcggcgcgggtgcggcgctggcagcattcctgttcacctccacgctgctggccagtggcctagccggcgtggtcggcctgatcgtggcgatgctgtccggccacccgggccgctttgccggcggtggcggttggggcggtggcagctggggtggcggaggcggtttcggcgggggcggtggattcggtggtggtggtggctggggcggtggcggcggccgttccggtggcggtggcgcttcgggaggctggtgatgatccaacgtctgttccgccatgtattctcgccctcggtgcggcgtgcgttcccacctgccacattgcaggcgatcaccggggccatcgcggccggtgagcagcgccacggcgggcaggtgatgttcgcggtggaagcggacctgccgctgggtgcgctgtggcacagggtgaccccgcgccaggccgccgagcatgcctttgcgcgcctgcgaacctgggataccgcccacaacaacggcgtactgatctacctgctgctggccgatcacgcgatcgagatcgttgccgaccgtggcctgcacggccgggtcagcccggcgcagtggcagcgggtctgcacccacctgcgcgagggcctgcgcggcgcccatccggtcgaggcattgcaggatgccatcgacgaggtctccagcctgatcgaagggcactttccggcctcgatgcggtccgagcatgacgcgttgcctgacgcgccccagatcctggactgaaccctgatctgcggcgtggtcctccgcccgtgccggccccggccccgggcggggcagggacgctaaaatacccgtactcccgccaggcgttttccatgatctatttccacgacatcgaccccatcgccctttcgctggggccgatcaaggtgcactggtacggcatcatgtacctgctcggcttcaccgcagcgtggctgctgggccgcacgcgcattgccgcggggcgcctgccgggcgtcgatgccaacggcttctccgacctgctgttctacgccatgctcggcgtggtgctgggcgggcgcatcggctacatgctgttctacgcgctgggcgatttcctgcacaacccgctgctgctgttcaaggtgtgggacggcggcatgagcttccacggtggcctgctcggcgtgctgggcgcctgctggtggtggtcgcgcaagcacaagctgcatttcttcgacaccatggatttcatggcgccgctggtgccactgggcctgggcttcggccgcatcggcaacttcatcggcgccgagctgtggggcaagtacaccgacgggacctggggcgtggtgttcccgtccggcctgccggccccgctgaaccagctcgaccacgcgacgctgcaggcgcagttcgccaccggcgcattgaacccgtacgcccgccatccgtcgcagctgtatgaagcgttcctggaaggcctggtgatgttcgtggtgctgtgggcggtgtcggccaagccgcgccaccgctacctggtgggtggcctgttcgcgttgatgtacggcctgttccgcttcgcggtggagttcgtgcgcatgccggacaacggcgtctacgtggccttcgactggctgacccgtggccagatcctcagcctgccgctgatcgccttcggcctggtgctgctggtgatgtcgcgccgcgcgccggtattgcagccgcagttgccggtggctgccgagggcaaggcatgaagccctacctggacctgctggcgcacgtgctcgagcacggcgccgagaagagtgatcgcaccggtaccggcacccgcagcgtgttcggctggcagatgcgcttcgacctcaacgaaggcttcccgctggtcaccaccaagaaactgcacctgcgctcgatcatccacgagctgctgtggttcctgaagggcgacaccaacatcggctacctgaaggacaaccaggtgcgcatctgggacgagtgggccgacgagaacggcgacctcggcccggtctacggcaagcagtggcgcagctgggccaccgccgacggccgccagatcgaccagatgcagtggcttgtggacgagatcaagcgcaaccccgattcgcgccggctggtggtcagtgcctggaacgtgggcgagctttcgcagatggcgttgatgccatgccataacctgttccagttctacgtggtggacggcaagctcagctgccagctgtaccagcgcagcggtgacatcttccttggcgtgccgttcaacatcgccagctacgcgctgctgacccacatggtggcgcaggccaccggcctgggcgtgggcgacttcgtgcatacgctgggtgacgcgcacctgtattcgaaccacttcgagcaggcccgcgagcagctgtcgcgcgcgccgcgcgcgctgccgaagctgtggttgaacccggaggtgaccgacctgttcggcttccagttcgacgacatccgcatcgacggctacgacccgcacccggcgatcaaggcgccggtggcggtatgagcgccctgaagctgtcgatgatcgtggcgctggaccgcaaccgtggcatcggccagggcaatgccatgccctggcatctgccggatgacttcaagcacttcaaggcgctcaccctgggcaagccgatcctgatggggcgcaagacggccgagtccatcggccgcgtgctgccggggcggaccaacctggtgctgacccgcagcggccaggtgccgttcgagggcatgcgtgcggtggcgtcgctggacgaggcgaaggcgattgccgaaggcgagggcgcccgcgagctgtgcatcatcggcggcggcgagatcttccaccagttgctggaccaggccagtgacctgtacctgacctgggtcgatgccgaagtccccgccgatacccatttccccgaagtggacgtgcaggactggcaggaagtgagcagcgagccgcacccggccgacgaacggcacgcctacgcgttccgcttcgtgcactacgtgcgccgctgatcgcaacgcacctgtagagccgagccatgctcggctgctttccgcggacacatcccggagccgagcatggctcggctctacaggattgcctacggcatccggtaatgcccgatgatcgcgtgctggaacagcaggttctcttcgcgcgtgccgcgcgcgatgttgtgcagcaccagcggtgtgccattggccaggcgccggtcagaaacgatgcccacgtgcagcaggccgttgccattgagcttccaggcaacgatgtcgccggccgcgtagtcggcggcgagggccgtgaccggttgctgccagccctggcgctcgaaccagcgcatcaggttcggtacacgacgatgatcgatgttgcggtccggccgtgacaggccccagatcgccggataggcactgaaactgccgcgcatgtcctcatgcacgcgtgcctgcaggtccaggcccagatcgcgcagggcgcgcaccaccacgtccgtgcacacgccgcgatccagtggcacgtcgccgccgggataggccagtacctggtaagcaggatcgtaacgggtggtgacgccgacctgcgcgcgggctgcggccaccagtggcggcgaaggggcctgcggctgcgtcggcgcatgtgcggcaccatccgcagccgtgggagcaggcggcgagccgggctggcagccgctggccagggccagcgtcagcagcaccgtccctggtgcccagccgcgccgcgtcacgcctgcggcgggggactgttgtgggtgccgccacccgcgccgccccctccgccaccacgacggcgacggcggcgtgggccacggttgcccggggtggcagcggcgttgccgccctgctccttgccctgcgtcgcagcgccggggcgctcgtgcgccggtcgcgccggcgggcgggcgttgggcacgggtgccggtacgtcgcggcccggaacctgcactacgcgcagctcgtcggtatcaagctggagcgcggtcagcttgccgccccagaccgcgccagtgtcgatggcgtgcacgccctgggtgatggtcaggcccagcgccgaccagtggccgcagacgaccttgaggtcgcgctcgacccggccgggcacttcgaaccagggatacagcccctgttcctgcgtgcccggcgtgcccttgtcctcgatgccgatgcgcccccgcggggtgcagtagcgcatgcgggtgagcacgttgatgatcgcgcgcgagcggtcgtaaccggacaggttcggggcccagctcggcttgtcgccgtacatgttgcggaacagcttgcggtagccggcgccatgcagttgcacctcgacctcggcagcatgcttctcggccatctgcgtggtccacttcggcgccaggccggcgtgcaccatcatccagcccagctcgcggtccacgtgcaccagcttctgcaggcgcagccagtccagcagttcgtcgcggtcctcggcctgcacgatgcgcagcaggtccgggttgaccttgcgctgttcctcttcggtacgcgaaccgacggccagcagcgaaagatcatggttgcccagcaccaccacgctgtgctcgcgcagcgagtgcaccagccgcagcgtttccagcgactgcccgcctcggttgaccaggtcgccgcagaaccacagggtgtcctgcgccgggtcgaagcggatcttctccagcaatcgctgggtgacgtcatagcagccctgcaggtcgccgatcgcccacacactcatcgttcggcctccgtgtcagtgcagggtacgcggcacggccagcacgaagggtgcgaccggcgcggcaaattcggtgccatcgtcggcgaccatgtcgtagtgcccctgcatggtcccgtgatcggtccccagcatgacaccggacgtgtaacggaagtcttcaccggggcgcagccgcggctgctcgccgatcacaccgtcgccatcgacatgctcgacacgaccattggcatcggtgatgcgccagtggcgcgcgaccaggcgtgccgcgacccgcccctggttgtggatgcggatcgtgtaggcgaacgcaaagcgaccgtcttccggcgcggattgatcgtcgaggaagcgcggcgcgacttcgacggagatggcataaacgtcagcgtcttccataccggcagtgtaatcaggaggcattggccaaagcgatgaattcggccacgtccagctgttcggcgcgggcatcgggacgcacgccggcggcgatgaactgctcggcggacaccacgttgttcagggcattgcgcagggtcttgcggcgctgcccgaaggcggccttgaccacctcggcgaagcgcttgtggtcgttgatgttgatcgcggccgggtcacgcggcaccagacgcaccacggccgaatcgaccttcggcggcggccggaacgcgcccggcggcaccacgaacagcgaggtcacctggcagtaggcctgcagcatcacgctgaggcggccatacaccttgctgccggggccggccgccatgcggtcgaccacttccttctgcagcatgaagtgcatgtcgcggatgaccgcggcatgctccagcgcatggaacaggatcggcgaggagatgttgtagggcaggttgccgaccaggcggatcggctggccggcggccagttcggtgaagtccacgcgcagcacgtcgcgatgaacgatggtcagctcgcccagcggttcggcggcggcggtcagcggcgcgatcagatcgcggtcgaactcgatcaccgtcagcgtggggtgcacgcgcagcagcggcagggtgatcgcgccctggccagggccgatctcgaccaggcggtcgccgtctttcgggttgaccgccatcacgatcttgtcgatgtagtggcggtcggccaggaaatgctggccaagctgcttcttggccggtgcggtgaacaccgggccggagggggaatgcggggaattcatgcgcccagtgtacgttgccgcgcaagctgcgcacacagcgtcgttgccgcctgcaggctggagggatcggcgatgccgcggccggccagctccagcgcggtgccatggtccaccgccacgcgcggatagggcaggcccagggtcaggttcaccgcctgttcgaagccggaatatttcagtaccggcaggccctggtcgtggtacatcgccagcacggtgtcgaggccggccagcttggcgggcaggaaggcggtatcggccggcagcggcccgaccaggtccatgccctccgcgcgcaggcgctgcagcagcgggatgaccagatccagttcttcgcggcccaggtggccatcttcgccggcgtgcgggttcaggccgagcacggcgatgcgcggcgcaggcaggccgaactcacggcgcagtgcggcgtgcaccgtgcgcagcgcgtgctccaggccgggcgcggtgatcgcatcggccacctcgcgcagcggcaggtgggtggtggccagggccacgcgcacgatgtggttggccagcatcatcaccaccttcaccccggcctggtcggccagcagttcagtggtgccgctgtaggcgatgccgccttcattgatgaccgccttgtgcaccgggccggtcacaacaccgtgcagttcgccggacaggcaggcctggccggcgccgagcagggcgccgatgaccgcgccggcattggccggatcggcctggccgaaacggctgggcgcagcgttgcggacagcgcgcaggcgcagatcgccgggggcgcgtgcttcggcgtcctcgggcagcagctgcaggggcaggttcagcgcggccgcggccgcatgcagggtgtccggatcggcgaaggccagcagccggcaatcttcacgcggctgctggacgaggcggacacatagctccgggccgatcccggcgggctcgcccggtaccagagcgagctcggggcgcatcggtcaggactgcggcggggtggcggtgttttccgcgcggtcgccgctgcggaagctgacgtaggcttcgccacgcagttcctgcaggaagcggttgtactcgtcttccagcttgcggcggccgatggtctcgcggacctgggcacgctggttgtcggtggtcacgtcggtctggcgggtcgccacgcgctgcacgatgtgccaaccggcatcggtacggaacggctggctgacgccaccgtcctggagaccttccacctgctggccgaaggccggaccgaacgcgtcggccgggaaccagcccaagtcaccgccctggcccttgctgttgttgtcctcggaggactccttggcaacggtctggaactcggcaccaccggcgatgcgggcacgcagggtgtcgatcttggccttggcggcggcgtcggtctggtggtcgtccacgcgcaccaggatatggcggccgtggaattcggtgaccgtatgctcaccggcggcggcggagctggcgtcacgcacttccatcagcttcagcagctggaagccgctcgggccacggatcgggccgaccacttcgccgggcttcatcttttccatcatctgggcaaaggcctgcgggatttcatccaggctgcgccagcccaggtcaccgccttccagtgcattcgggctgtccgaatagcgcacggctgcagcgttgaagtccagctcgcccttgtccagcagggtcttcacaccatcggccttcttctggccggtggcgatctggtcggcgttggcaccgtcgggcagggcgatcaggatgtgcgccaggtggtactggttgcccaccgtggcctgctgcttcagcgcggcgtcgacttcaccctcgctgacgctgatgcggctctgcgcgaagctctggcgcaggcgctgcacggtgatctcgtcacgcaccgaggcgcggaaatcgttgaagtcgatgccgtcatgggccaggcgctggcgcagggcgtccaggttcgaaccgttctgctgggcgatggagttcatcgcctggttcagctcctggtcgctgacccggatgccgctgccctgggcgcgggccacctgcagcttgaccagcaccaggcgctcgagcacctggcggctgagcacgtcttccggcggcagctggttttcgcggccggcgtactgcgccttgatgttggcgatcgcacgctggagctcgctctgcaggatcacgtcctcatcgacgacggcggcgatgcggtcaagcggctgcgcctcctgggcaagcacctgcaggggggcggacacgctggacaccgccagcagcgaggcgagaagaacggggaagcgcttggtcatgggatcaggttcggatcgtagtcatcccgggtcgccccggtgttgctcggcggcacgagatagaggtcgtcgcggttgtaaccgaggatagcacggcgcagggtacggtccgtgtcctggcccagggagctcaggcccttgagcacgaactccagctggatggcgttgttcatctcgccttcgcggttgcggacgtagcggcgggcgaccgcacgcacggccaggcagcagctgtcccactggacgccggcgatgatctccagcggttccttgtcctgcagcgagtagtagtagcggccgaccaggctccagcgcgcattcagcgggtacaggaacgacaggtcggcctgttccagcggcgtgcggtcatgcttgttggcggtggccggggcgccggagttgatgcggtaacggtagctgaggttgatcacgccatcgttgggcatcaggtagcgggcgcggacgctggccagatcctcgcgcttgtacttggggtcccactggtaggtggcacccagggtccagcggtcgttgatcatgtagttgccgtcagcgatccacgccgacttgcccttctccaccggcgcgccacccggggtgacggtcacccgcgattcgtcgaagtactggatctggccgatggaggccgagaagcgttccttgccggtggtctggtcgatgaagcgggtgctcagcgccatggtcagctggttggcgtcgttctggcgatcggcgccggtatagcgagaatcgcggaacagctggccccagctgaaggtgaagtcgcgggtgtcgaagatcggcagctcgtcctgatcgcggtagggcgtgcgcaggtagaacaggcgcggttccagggtctgcaggaaggacttgccaccgatgcgggtctcgcgatcgaagaacaggccggcgtcgatgctgccgatcggcaggctgcggctgggcgaggtgttgccgcgcagctgttccggtgtggcggtgttcgggtcgatgccctgcgaacgcaggatctggccgcggatgccgttcacgccatcaaccaggccacggtccagctggtaaccggtatagcggtaggccagggtcggcgtgacataccaggccgcgccgctgatcgggaacgacacgtagggtttgacatccagccgcgagccgccgctgacaccgatgccgtcggtctgacggctgccgttgcgggtgtactgcaggtccggtcccgcatcagcgccgtacttgaagttgatgtcgtcgtgggtgaaacgcacggcttcggcgtagatgccggtttccagccacggcaggaccggcttgtcccagttgaaatacaggcgcggctggcggttgtaggccagcgcaccctcgttgagggtgtagtcggtcagctgccagcggtcggccatgatgccggccgtccagttcctgccagtgccgtacaggccgatggtgctctgcaggttcgacgcggtgactcccaccaggcggttggcgaagtcttccacatagcgttcgtcgctgacccaggccaggttggcgcgggcctgccagtggtcgtcgaggttgtggtagccgccgaacatcacccggccgcggtcgcggtcgcgcagtttgtcgttgggcatgaacgcggtcagcagttcgccgcggccgccgttgtagaggtagcggaattcgttgtcgagcatcaggccgcgccggctcatgtagcgcggggtcaacgtgtcgtcgtagttcggcgccaggttgaagtagatcggctgtgcgtaatcgaaaccgttgcggccggacatgcccagctgcgggaacagcaggccggtcttgcggcggtcgtcgatcgggaacttgaagtacggcgcccacagcaccggcaccttgccgatgcgaagcacggcgttgcgggcggtaccgaagccttcgtcgttgtccacttcgatctgcggcgccgacagcttccacaccggctgcgacgggtcgcaggtggtgtaggtggagcggtgcatctggccgaccgcgccctgcaggtcgaccgattcggcatcgccgttgccgcggcgcgacaccagctggtacttgatgtcggtgatcttgtgggtgtcgctttcctggttgccctcggcgcgcttggcgaccatgcggatcgaggagtcctggtagcggacattgccgtcggcgatgtagttgccggtctcggtatcgaagctgagcttgtcggtgccgacgaactggtcgccacggcgcagggccacgttgccttcgtactgcggcacggtggtggtgcccagcagctggtcaccctcgatgtcggtcggctgctgctcgcgcgcggcgctggcggcggccttgtcctgccccgggaccgggaccgggacaggggcatcggtgaacgcgggaatcacgtcggtagccgggcacaggccccagttgagcggcttttcatcggccattgccggcaggcagatggcgatgctcagaggcaggggaagcaggcggagggctcggcgcacgcggttcggattcgggcgaaaacggacggtagcttgccccatcccttgcataggggcaatgaagggcgtcggatcctgccggttcgggttcatccggagacgctgcccggtggggggggcagcagggcccggacatgggccacgctgcactcggcaagggcctgcaggtcatagccgccttccagcatcgagaccacccggccggccgcatggcggcgcgccagcgcatgcagttcgcgggtgatccaggcgaaatcgtcggtttccagcatcaggtcggcctgcggatcgcgcaggtgggcatcgaagccggccgaaatcagcagcagctgcggccggaagtcgtcgatggccggcagcatctcgtcggcccacacattgcggaagcggaaaccgccgctgccggggggcagcaggatgttcatcaggttgccggcaccgcggtcgcggcgcaggccggagttggggaacagcccggcctggtgggtgctgtagtacgagacccgggcgtcgtgctggaagatgtcctgggtgccgttgccatggtggacatcgaaatcgaccaccgcgatccgctccaggccatgacggtcacgggcgtaggcggcggcgatggcgatgttgttgagcaggcagaagcccatcgcagtgctgctggtggcgtggtggcccggtggccgcaccgcgcagaacgccagcgggtcctcgcccagcatcaccgcatctaccgccgccacgccggcgccggcggcatgcacggcggcactggccgagccgggcgaggtccaggtgtccatgtccagctgtcgcagcggcgcggtctgcggctgcagcacgaagtcgagcagggcgctgtcgtggacccgggtcagttcgccgaacttggccggcggcgcctcgcgccagtccagctggccggggaaggcggcgtgcagggcatcgagcacatgctgcaggcgttgcgggcactccggatggccagggccggggtcatgcagcaggcaggacggatgggtgaagaccagcatcgtgccgactcagcgctggcgctgctgtggctgccacagcgcttcgccatggccatcggcacgggccagcacccgggccagcacgaacaacaggtccgacagccggttgaggtactgcagcgcctcgctgcgcacggcgtcgtggcgggccagggtgaccgtctcgcgctcggcccggcggacgatggtgcgcgccaggtggcagcgtgcggcggcctcgccaccggctggcaggatgaattccttcaacatcggcaggctggcgttgtagtgatccagctgctgttccagtgccgacacatcggcggcgtggatcgcggcgtggccggggatgcacagttcggcgcccaggtcgaacagctggtgctgcagatgcaccaccagcgcgcgcacgtcgtcgggcagcgccgtggccagcagcaggccgagtgcggcattggcttcgtcgacagtgccgtaggacgccacgcgggcatcatccttggccacgcgctggccgtcgccaaggccggtactgccgtcgtcgccggtgcgggtatagatgcgcgagaggcgatgacccatggcgcggctcagtgccggatgtcgcggcgggcctgctggagcttcagcacctgctccacggccagctgcagggcggcggccagcgccacgtagatggcggtggtgcgcaggtacggcccgaaccactgtgcgtagttctgtgcccagccggccagcgtcggttcggccacgttgcggctggtccagtagaagccgccctgcgcgagcaggtgacagaccgccaccgaggccaccagcagcagcgcgcccttggccagtaccggccagcgtgccccctggtagttgcggcccagcagcatgccgccggcccaaagcgagaaatacgccggcagcagcagccagtagcccggcgacacgcagtagtgctgccagaaatccaggccgctgctgcggatcacgatccagtccaccagcaccgcgaacaccatcagcagcgggaacgcccagcgggtccagccagccaggtagaagccgccgatgaagaacaccgcccaggaggcatccgggatcgccgcgaagtggttgacccgggtcgccgccagcaacagcacgagtacggacaggacgaaggcacggttggcggtggcggacatggcagcgggcccggagcggattcaggtttcattctagcccgccgcgccggttggcgcaggtcgggggctgttgggtgttcgggcggggcgagcgcgtatcatgaacaccatgagtgaacgacatgacgtgctgatcgtcggtggcggcctggtcggtgccagcctggccattgccctggaccggttgggccgcgacgtgggcctgctcgaagccagcccggccggcgagctgccggcggtgttcgaccagcgcaacctcagtttcgccgcggcgaccgtcaacgcgctgaccgcgttgggggtcatgcagaagctggcgatggcgccgggcccgatccgccgcatccatgtcagccgcgccggcgatttcggccgcgtgcagctggaggcttccgactacgaccggccgtggttcggccaggtggttgtcgcgcgtgacttcggccaggcgctggaagcgcgcctgcaggagctgccgcagctgcggcgctaccggccgatgcggttcctgggcctgggcgaggtggtcgacggctaccgccaggtgcgggtggccgacgagaccggcgagcgcgtactgctggcacggctggtggtcggtgccgatggcacgaccagcggtgtgcgtggcgcgctgggcatcgaggtcgaccggcatgatttccagcagaccctgttcgtggcccgcgtgcgcagccagcgcgcgccggatggcacggcctgggagcgcttcaccgataccggcccgaccgccctgctgccgcgcggcgaccgccacttcggcaccgtgcacggcgtggcgcgggaccaggccgatgcggtgatggcgctggacgatgcggcctggctgcagcgcctgcaggatgcgatcggctggcgtgccggtcggctgctcgaatccggcccgcgcagcgcttacccgctcatccaggtgctggcgcgcgcattggccggtgaacgcacggtgctgctgggcaatgccgcgcagaccatccatccgctgggtgcgcagggcttcaacctgggcctgcgcgatgcgctgaccctggccgaactgctggaggatgcgcacgaggatgccggcagcgatgtgctgctgcaggcctatgttgcgcgccgccaggaagaccgacggcagacggtggcgttctcgggtggcctggcacggctgaccagcaatccggcaccgctgatgcggccgctgcgcagcctcggcctggtggccgcgcaacgcgcctcggtgcagtcgatgctggtcggtggcgcgatgggcttccgcggcgaagtgccgcgcctgtgccgcggagaagccgcatgagccggcgcatgcgccttgatgtggccatcgtcggtggtggcgtggtcggtgccgcgtgcgcgctggcgctggccgatgccggcctgtcggttgcgctggtggaaggtcgtgagcccgcgccgtggcaggccgcacagcctgacctgcgcgtgttcgccttcgctgctgacaacgtacaactgttgagccgcctgggcgtgtggccggcgatcgcgcaggcccgcgcctggccctaccggcgcatgcaggtgtgggatgcggccggtggcgaagatctgctgttcgatgccgatcgcttcggccgtcgtgaactgggctacatcgtcgagaacggcctgctgcaggatcgcctgtggtcggcactgccggcggcgggtgtgcagctgcactgcccggcacgggtggacgcgctggagcaggacgaggagggcgtgcgcctgcgcctggatgacgggcgtcgcctggaagcggcgttggcggtggccgccgacggcgccgagtcgaccctgcgccagctggccgggatcgaggtcgagcggcacgactaccaccagcgtggcgtggtggcctacgtggacagcgatcttcccaaccaggccaccgcctggcagcgtttcctgccgggcgggccgctggcgctgctgccggtggccgagcgccgcagctcgatcgtctggaccctgcccgaggacgaggcggcacgtgtgctggccttggacgaggacgccttcaaccgcgaactgacccgggccttcgcggcgcggctgggtgagctgcgactggcgtcaccgcgagcggccttcccgctgcgtcgccaactggcccgtcactacgtggccggccgagtactggcattgggtgatgccgcgcatgtggtgcatccgctggccgggcagggcgtgaacctgggcctgcgcgatgtcgccgccctgcagcagtggctggcgccgtcggccgagcgccgtggccagccgcggctgtcgccgcagcgcctgcagcgctgggcacgcgaacggcgcagcgacaaccagatcgccgcctacagcttcgatgcgatcaaccgcctgttctccaacgacgagatgcacttgaccctggcccgtggccgcgcgctgggctgtgtcggcaaatggccgccgctggtacaggcgttctggaagcgcgccgccggcgtctgaagcaaaaaggggacggaggggattaagtcgtttgtgcacatacgacttaatcccctccgtcccctttttcaatccaccagccagccggccaggtcggtgcggtccagcttgccgcggtgcctgcggtccagcgaattgaattcgtcggccagcgccggattggcctgtgcttcctcgcggctgatgaaaccgtcgccgttcacatctagcgcggcgaaatggacgcggtactggccgaccacgctgctcggttccagcgaacgcacggtcacctgtgcctcgccggccggctgcggaatctcgacgctgccgctgacccggccggcatccagcggctgctggcggatcgcgccgccggtggggcccagcggctggctctgcgccggcgtggacgggccgtgctgggcgatggccggtaccgaggccagcaggatggtcaacagcagggcagcacgcggaaggttcatgacaggctccttgccagagggtaccgggagcgtactcccggcaacctgtgccgccgatgacggatcagcgcagcggcgaagccagcacggtgatctcttcacggtcgtgatagagctgcttggcgcggaccaccagcggcttgccggcctggtcctggaacaggtccaggcacagccgggtttcgtcccagcgcttcttcatcggcagtttcagattgaagatcgcatgccggcaccagccctcgcggaaccaggtggccatgcgttcggccacgcggcgcggctgctcgaccatgtcgcagaccatccagtccagcggctgttccgggtgccagtggaagccatcggcgcgcaggtgctcgaccagtccggtgtccagcacgtgctggcgcagcgggccgttgtcgatgctcagcacgtgcatgtgctggcgcgtcagcacccaggtccagccgccgggggcggcgccgaggtcggccgcacgcatgccgggcttggccagcgcctcgcgttcttccggcgtcagcagggtcagcagcgcctcgtccagcttcagcgccgaacgcgaaggcgcctcgggcagcagcttcaggcgcgggatgcccagcgcccacggtgcgctgtcggccgggtcggccacgcagacgaaggcatgggtgccatcgacgaacaccacatgcaggcgcggcaggcggttgttcggcttatcagtgagcttgccggccttgcgcagcgccgggcgcagtgcattgccgaaggcacgggccagaccggacagtggcttgccggcgtccgaatcggggtgttccacccacaggtcgccgaagcgcggcgcatcggccagcacttccagcatcggggtgatccggtccgccgggtccagctgcggcagttcggccagcaccaccagcttctgccgcgcgaagatcagctcgcgccagcgcaggcgcggcgccagcgcggcggcttcgtcgcacatgaaaagcacgtagccgtaattgcgctgggtgcgcgcatagccggcgaaaccggcttcaccggcgcggaactgcagctcgccggccagctcgggctcgaagccctgccggcacaggcacagcaggccgatgccggtttcagtaacgggcgccatcgctttccccataggcacgcagcacgctgcgcgcggcgtcgcggttcaggccttgcaccacttcgatgccgcgcttgttgagttcacccacccagtcggccggcagcgggccttcatcgaacggggtcagttcctcgacgtcggccgagttggcaccgatcagcaggcggtcgatgccggcccacacggtggcgccgtagcactggcagcacggctgcgagctggtggccagggtgaccggcgacagcaccgcgttcaggcgcggggtctgcaggcgctgctgggccagcatgtaggccatgttctcggcgtgcgccagcgaggtcgcgtgcggcatcacccggttcacgccggcggcgatgaccttgtcgtccggtccgaacaccaccgcaccgaacggaccgccactggcgtgctcgacgttcagccgcgacagctcgatcgccagcgcgaccttggcctcatcgcccggatatcgacgatccaggtcgatctggtcgtggatccaggcgggaagggtcaggtggacttgcgcgtacagcatcgcgggggtgcctcgtagtggatggaagaaagtgcggttgcttggggaaaccggcgcgcagtgtagccgcaccggcctgtaccgcgcgtgggccgggctcagcccggcgagccggtgcggatcaccacgtactgcttgcggaattccagcccggcctgcggccaactggcagcataggcgcgcagcaggggcagggcggcggcgaagtcgtggccgttgacccggcaatcggcctcgcacaggccgtcggcatcgcgcgatgcgaacaggcggatggcgagaaaatggcgggctttcagcagctcgtcgaaggcctccatgctgcgggtgaacaggcagcaggggcaggagccatgatcgtcttcgctgcaggtggaggcatccacgtcctgtgcacggtagtgcgccaacggccccagcaccacggtgcgctgatgttcctcaccctcgtcgccgaccggataggtcaggcccatcatcggcaggccctgtgcgtcttgggcgccgatcgcggtctgcagggtcaccaggtccacccgggcccaggcctggaagccggacaacagcgatgcctgctcatcggcaccatttgcgtgctggtactcgaacaggccatcggcgaacaactgcggatgctggctttcaatgacggtggaggtctgccagccgccgttgtcgcgcgcttgcgcggccattgcatgcggggtcaggcgcaggccgctgtccagcagcagcgcgttgccgtcgatgcggctggcggtgccggtgtcctgcagggcctgctgcagcagcgggaggagggcggtggcgctcgtggtcatgtcaggcctgtggatggatggggcggaacatccaggcagggcctggggctagcggtcgagtgcgtcgagctcggcgcgatatcgctgcgcgtcggattgctgctgcggatcgttgccgtggtcgcgcagccaggtttccagctcgcggcgatagtccgcgcggaaaccggcattgcccgggctgaaatgcagcttgcgtgccgccacctccacccgctcgcgcgcgctggcccgggcctgggcgacgccgtgcggtgactcgttggtgaggatgacgaagttgcgtgggaagcccggcgtgtacttgaccacgaacggctggtcgcgcgccgggatacggatggcgttttccagcggccacagcgaagcggtgttggtgtggaacaccacgtccacgtcgcggccctcggcggtacgcagcaccccttcgtagcgccagatgtactgctcgttgagcgtggagctggttcgctcggtcttgacgatcaccgcttcaccacgctcgcccaccacgttgaggaaggcggcgttgaggaagtggccgaggaacatgttgagcatcgccagcgggaacaccacgatggcgtagcccggaaagcgccgccaccacgagaccagcccggccagcaccattgctgcaaagaacgtcagcagcggatgctgcgagatgaaccagagcaggacggaaagggcggtgatcatcgtcgcggtcctgcgggcgccatccaggcgcccgcgcaggccctcaggccgaccaggtatcgcgcagggtcacgctgcggttgaataccggcgtggctgcggtatggtcgcggcggtcggccacgaagtagccggtacgctcgaactggaacgactgctccggcgcggcgctggccgcggccggctcgacatagccggtgacagtgcggcgcgattccgggttgaggtaatcgcggtaggtcttgccttccgattcgtcgtccgggttcggcaccgagaacaggcggtcgtacaggcggatctcggccggcacgccatgcacggcgctgacccagtggatggtgcccttgaccttgcggttggcgccttccatgcccggacgcgattccggatccagccaaccacgcagctcggtgatggtgccgtcggcatccttgatcacttcgtcgcagcggatgatgccggcgccgcgcaggcggacttcgccccccgggaccaggcgcttccagcccttcggcggcacttcggcgaagtcctcgcggtcgatccacacttcgcgtgcgaacggtacttcgcggctgccgaagctttcgtccttcgggtggttgctgaaggtcagctgctcttcgtggccttccggcaggttggtcagcaccagcttgaccggatcgaccactgccatgcggcgcggtgcggcactgtccaggtcctcgcgcagcgcgccttccagcacgctgaagtcgatcagcgaattctgcttgctgatgcccacgcgctcggcgaacaggcgcatcgcggccggggtgtaaccacggcgacgcaggccctgcagggtcggcatgcgcgggtcttcccagccgtccaccagctgttcggtgaccagcgccatcagcttgcgcttgctcatcaccgtgtagttgatgttcaggcgcgagaactcgatctggcgcggcttggccgcttcgcgcggcaggccggcatcgaccagcggctgggtcagtgcgtcgtcatgggcgaaatcgacgttgtccacgcaccagtcgtacagcgggcggtggtcttcgaactccagcgtgcacagcgagtgggtgatgccttcgatcgaatcacccagcgcgtgggcgaagtcgtacatcgggtagatcggccacgcattgccggtgttctggtgctcgacgtgcttgatgcggtacagcgccggatcgcgcaggttgatgttgccgctggccatgtcgatcttcgcgcgcagggtgcgcgcgccatccgggaattcaccggcgcgcatgcggcggaacaggtcgaggttttcctcgacgctgcggtcgcgccatggcgacgggcggcccggctcggtcagggtgccgcggtaggcgcgcacttcctcggccgacaggtcgcagacgtaggccttgccctgttcgatcagcttctcggcggccaggtaataggcctgaaaatagtccgaggcgtggcgcagctcgttccactcgaagcccagccagcgcacgtcgtcctggatcgcggccacgtattccggatcttccttggccgggttggtgtcgtcgaagcgcaggttgcagacgccgctgaactcgccggcgatgccgaagttcaggcagatcgacttggcgtggccgatgtgcaggtagccgttcggctccggcgggaagcgggtcttgatcgcctggtgctttccgctggccaggtcctcgcgcacgatctggcggatgaaatcgcgcttttcgtggctgtcggcgggggtctcggggctggcgggggtgtgctcggacatgagtcggcgaaaagaaaggcagaaagaccaacagtctagcgcgtacggggcagggctgcccggtggggtgtggggatgccggccagcggccggcactccccttgcctgcaatgccggccccaccctctggtagtgccggccgctggccggcaacctcggatcccaccctcggcaccattcagcccccgggcgtatgctggagccctgccccgaggaggagccgcatgcacatcgtgtacaaggccgacaacctgttcgacgcccatctggtcaagcacgcgctggagaacgccggcatccccgccttcgtgttcggcgagcagctgctggggggcatgggcgagctgccgttgttcggtgtgttgcgggtcggcatccccgacgcggcgcggccgcaggcggaggccatcatcgcggcgctggacttgggccaggccgccgccgaccccatttccgatgcagacgatatggccggactgccggcgtaggagcgcatcatgttgggaattggccagggcatcctcggcatcggggccttcaagcagcgcctgccgcgcccggaagaggcattgccggggcgcgagcagccattgccgctgcacagcaaccagcacttcgtgaacagccatccgctgaaggaccgcttcgccggcctgcagcagatccgcttcgcgctgggctgtttctggggcgccgagcgcaagttctggaccgagccgggcgtgtacagcacctcggtcggctatgccggtggcatcaccccgaacccgacctatgaagaagtgtgctcgggcctgaccgggcacaccgaagtggtgcaggtggtgttcgacccggcggtggtgagcctggaacggctgctgcagctgttctgggaaagccacgacccgacccagggcatgcgccagggcaacgacaccggcacccagtaccgttcggcgatccacgccaccgacgaggcacagtacgctgccgcgctggccagccgcgaggcctaccaggcccagctggatgcggccggctacggcccgatcaccaccgagatcgtgtacccggcaccggcgtactactacgccgaggactatcaccagcagtacctggcgaagaatccgaacggctactgcggcatcggcggcaccggcgtgagctgcccgatcgggttggatgtggaggcgccgcgctgacgcgcggtggtccgcctgcggcgggcagaagccaaagccaaagccaaagcggctctgggttgctgacggtttggcgggacgggggcggctggcaggacacgccgtaaacccatccctgggggctcgatggcgccatccatggcgccaacggtcctgccagccgcccccgtcccaccttcgacagtttccgggtgacggtgggcaagagcattggttggtgacgaactgatggaaaagaaaaaggacgcggcgttcgccgcgtcctttttatttggttctgcattgcccttgtagagccgagccatgctcggctccgagcaagcgaagcgcgcgacccgctgttgctcttctttctttcttccgtggcgggtggccaccggaaactgtcagagggcgggcgggttgggttcgcgggagtgtccgccgcatggatgcggcggccaagcctccagggatggattcacggcgtctcccgcgaacccaacccgcccgacccagcgcggctttttgctcttcgcgaccgaccgacctgccacgaggggctcagccgttggccggaatcctcacagtgccgcgcggatccgctcgcgcagtgcttccagatccttggcaaacgcatcgataccggtcgccagcttctcggtcgccatcggatcggccgccagatccgccgcgaacttcgccgcatcgatcgggggcaccgccgcgccatcagcggcaccggccaccagcttgcgcggcagcgcgccgtggtcggcgtccagcttctccagcaggtccggcgaaatggtcaggcggtcgcagccggccagcgcttcgatctgtgcggtcgaacggaacgaggcgcccatcaccaccgtcttcgaaccgcggcgcttgaattcggcatagacgccgcgcacgaacttcacgcccgggtcttcgtcgatgctggccggggtctggccgttggccacgtaccagtccaggatgcggccgacgaacggggagatcaggaacgcgccggcctcgctgcaggccagcgcctgggtcgggttgaagatcagggtcaggttgcagtcgatgccttcggcctgcaggatgcgcgcggcttccacgccttcccaggtcgcggcgatcttgatcaggatcttctcgcgcggcacgccggcatcggcgtacatctgggtgaactggcgggccttggccacggtggcggcggtgtcgtgggcctggtcggcgtccacttcggtggacacgcggcccggcaccagcgtgctcagcagcgcgccgacgccgatggtcaggcggtcggccacggcgtgcaccacggcttcgcggtcgccggcctgctggcggccccaggccagttcgcgttcgatcagttcggcgtagaccggcaggtccagcgccttcttcaccagggtcgggttggtggtgcagtccaccggctgcaggcgcttgatcgcctcgtagtcaccggtatcggcaacgaccacggacagttcgcgcagctgggacagtttggacggggtactcattacggctcctggtgcaaggggatcgaatcgcgcgcggtgcgcagcggtaatcaggggcggtcgttgtggaccgcggtcacgcgcaggcgcagcttgcggccgccgggcgcgttccagtcgatgctctggccgatggccaggccgagcagggcactgccgaccggggccagcacggagaccttgccttcatcgacattggcttcgcgggggaagaccagggtcaggacgtgcttttcgcccgacacttcatcttcgcactccacgcgcgaatgcatcatgacgatgccttcgggaatctggtccggtgccagcacggtggcccggttgagttcttcagcaagcgcgagcgcggcaggcgtctggctcagcgcaggggattcgagcatggcgtccaggcggtccatgtcgaaggtagaaacggtgatcgacggcggcaggccgctggcggtgttcatggtgaagctccttggttgaaagccatgcaaaaggcggcacctgctggcgccgcctgtctgtattgtggggacaaatgcggccggaatcgactcctgccgattccgggccggtgctgcgggggctcagccgttcagcgcggggccgggcagggccggtgcatcgctgccggcatcgagcgcctccagcgtgaacagtgcctgcggcaggcgcttgaactggtcggccagctccatcaggaagtcgttcatggccgagctgcggcgccagatcatggcgatgcggcggctgggacggccttcgccggtgaaatcgagcaggcggatgttgttcgagcgcggcaccggcggctgcaccgacaggctcggcagcagggtgatgccgacgtcggcggcgaccatctgccgcagggtttccaggctggtggcgcggaattcggacttctcgttggcgccgaacagtcggcagacttccagcgcctggtcgcgcaggcaatgcccgtcttccagcagcagcagcttctgcgtggccagttcctgcacgtccaggtgttcgcgacgggccagcgggtggcgcccggacacggccagcaggaacggttcctcgaacaggaattcggcatgcagctggtcgtcgatcaccggcagggccagcagtgcggcgtcgagcttgccttcgcgcaggcggtccagcagcacgtcgctcttttcctcgaccagcagcagttccagctccgggaagcgctcgcggatgcgcgggatcacatgcggcagcaggtacgggccgagggtcgggaagatgcccaggcgcaccgtgccggcttccggatcgcggctgcgtcgcgccgcctccttcagctgttccacttcggacacgatcacccgcgcccgtgccgccgcttcctggccggccggggtcagcatcaccttgcgcggtgcgcgttccaccagcggcaggcccagctcttcttccagcttgcggatctgcgtcgacagcgtgggctggctgacgaagcaggaggcggcagcccggccgaaatgcttgtggtcggccagggctaccaggtacttcagatcacgtaggttcatccttacaccccaggggtaacggaccggctgacggcgtggttacccgacaggcagacaatgttcccggtgatctgggaacggtggatcaggctgcttcagcaacggcaccgctgctgttgctcaccgacgagcggatcaggtggtcgaacgcactcagtgcggcggtcgagccggcgcccatggcaatgatgatctgcttgtagggcaccgtcgtgcaatcgccagcggcgaacacgcccggcaggttggtctggccgcggtcgtcgatgacgatctcgccgcgcggcgacagcgccaccacatccttcagccactcggtgttgggcagcaggccgatctgcacgaagatgccttccagctcgacgcggtgggcatcgccgccgacgcggtccttgtagaccaagccggtgacgcggctgccgtcgcccagcacttcagtggtctgcgcgctggtcagcacggtcacgttgcccaggctgcgcagcttcttctgcagcacttcatcggcgcgcaggctggaatcgaactccagcagggttacatgcgacacgatgccggccaggtcgatggccgcttccacgccggagttgccgccgccgatcaccgccacgcgcttgcccttgaacagcgggccatcgcagtgcgggcagtacgccacgcccttgttgcggtactggtcttcgcccggcacgttcatctgccgccagcgcgcgccggtggacaggatcaccgaacgcgacttcagtaccgcgccgttttccagctgcacctgcaccaggccgtcttcgccggccggcaccagcgcactggcgcgctgcaggttcatgatgtccacctcgtactcgcgcacgtgctgctccagcgccgtggccagcttggggccctcggtctccttcaccgaaatgaagttctcgatcgccatggtgtccagcacctggccaccgaaacgctcggcggcgatgccggtacggatgcccttgcgtgcggcgtagatcgccgctgcagcgccggccgggccgccgcccaccaccagcacgtcgaaggcgtccttggcggcgatcttctcggcatcgcgcttgccggcgttggtgtccagcttggccacgatctgctcgagggtcatgcggccctggtcgaagatttcaccgttgaggtacacggtcggcaccgacatgatctcgcgcttctcgacttcgtcctggaacagggcgccatcgatggccacgtgctggatgcgcgggttgagcaccgcggccaggttcagcgcctgcaccacgtccgggcagttctggcaggacagcgagaagtaggtctcgaaccggtagtcgccttccaggttctgcacctgctcgatcagctcggcagtggccttggacgggtgcccgccgacctgcagcagcgccagcaccagcgaggtgaactcgtggcccatcggcaggccggcgaaggtcaggtggatgtcctggcccggggtgcccaggtcgaaggacggcacgcggccctggccatcgcgcagcacctgcagcgagatcttgtccgacaggctgtccagggtctgcagcagttccagcatttcctgcgacttggcgccgtcgtcggcgtgcgcggtgatctggatcgggcgggtcacgcgctccagataggtcttcagctgcgactgcaggttggcgtccaacatcggtcttctcctggcttcaggcaaacagagggcgtggcaccgctgtacaaggtagcggaccagctgggggtaggggtgaacccaagacagcgaccgtggaaggggctggctggccaaggcgggcgagcgttggctgtcttgggttcacccccacgccggcggggggaccggcacggggatgaagggcgcgccgcggcgtggggccacggcaggccggtactgccttagatcttgccgaccaggtccagcgacggggtcagggtcttctcgccttccttccacttggccgggcagacctggttcgggttggcggcggtgaactgggcagctttcagcttgcgcagggtctcggacacgtcacgggcgatctcgttggagtggatctccagggtcttgatcacgccttccgggttgatgatgaaggtgccgcgcagggccaggccttcttccggaatgtgcacgccgaaagcgttggtcagctggtgggtcgggtcgccgaccagcgggaactgggccttgccgacggccggcgaggtctcgtgccacaccttgtgcgagaagtgggtatcggtggtgacgatgtagacctcggcgccggccttcttgaactcggcgtagtggtcagctgcgtcctcgatctcggtcgggcagttgaaggtgaaggcggccggcatgaagatcaggacggaccactggcccttcaggctggcgtcggaaaccttgatgaactcgccgttgtggtaagcgttggcttcgaacggctggatctgggtgttgatgagggacatcatttttcctcttggtgaaggggagtgggtgaatcgacaggagctaggttacccattcgctgacgataagaacaatgcattgattgcatctatttgatagatggagtctatcaaaatgcactgagcaggcactgaacccggccgctttcatcctgcaactgactgtgtgacaaggaaaatctcgccggaccgctgcctggggccgatagcccctccttatcccgtccggcgtaacctgaacggattccgattttgtagagccgagcccgcgctcggctgctccagaagcagccgagcgcgggctcggctctacaattgcggaatgtctttccaaaccgaacccaccctgcgccagatcgtggccgaggccagtgtccgcctcggcagcgtcgaagcccgccatgaggcggagctgctgctgctgcatgtgctggaacgcccacgcagttggctgttcgcgcatgccaccgatccgctggccgccgccgaccaggccgccttcgagacgctgttggcccgccgcgtggccggcgagccggtcgcctacctgaccggccgccgcggattctggacgctggatctggaggtcgatccggccacgctgatcccgcgcccggagaccgaactgctggtcgagctggcgctggaacgcctgccgcaggaccgtgcgctgcggctggctgacctgggcaccggcagcggcgcgatcgccttggcgctggccagcgagcggccacaggcacaggtgctggccaccgatgccagcccgggtgcgctggccgtggccgtgcgcaatgctgcgcgccatgaactgcgcaacgtccgcttcgccgagggcgggcacgattggtacgcgccgttgcagggcatgcgcttcgacctgattgcgagcaatccgccgtacatcgccagcgacgacccgcacctgcgacagggcgacctgcgcttcgaaccggcctccgcgctggcgtccggtgtggacggcctggatgacatccgccgcatcatcgacggcagccaggcgcatctgctgcccggtggctggttgctgatcgagcacggatgggaccagggcgcggcgatccgcgcgctgttcgacgccgccggttttgccgaggtgcagaccgtgcaggacctggagcagcgcgaccggatcaccctgggccggcgaccggcctagaatgggggttctcctgccccggcagggcatcaccctggagctgcaagcatgcgtacgctgtaccccgccatcaccccctacgacgtcggcaccctgaaggtcgacgaccgccacacgctgtatttcgaacagtgcggcaacccggacggcaagccggtggtgatgctgcacggtggcccgggcggtggttgcagcgacaagatgcgccagttccatgacccgtccaagtaccgcatcatcctgttcgaccagcgtggtgcgggtcgatccaccccgcacgcggacctggtggacaacaccacctgggacctggtcgccgatatcgagaagctgcgcgagcacctgaaggtcgatcgctggcaggtgttcggtggcagctggggctcgaccctggccctggcttatgccgagacccatccgcagcgcgtgaccgaactggtcctgcgcggcatcttcatgctgcgccgctgggagctggaatggttctaccaggaaggcgccaaccgcctgttcccggatgcgtgggagcattacctgaagccgatcccgtcggtggagcggcatgacctgatctcggccttccaccgccgcctgaccagcgacgacgaaaccacccgcctggaagcggccaaggcctgggcggtgtgggaaggcgcgaccagtttcctgcacgtcgatgacgacttcatcaacagccacgaagacccgcacttcgccctggccttcgcccgcatcgagaaccactacttcgtcaacggtggcttcttcgaggtggaagaccagctgctgcgcgacgcgcaccgcatcgccgacatcccgggcgtgatcgtgcacggccgctacgacgtggtctgcccgctggccaacgcctgggacctgaccaaggtgtggccgaaggcgaagctggaaatcaccccggcctcgggccattcggcgttcgaggccgagaacgtggacgcgctggtgcgcgccaccgatagcttcgcctgatcggtagtgccggccgctggccggcaacgccttgccgggtcgtttcgccgccgcccgatgtggctcgccggccagcggccggcgctaccggatagccaaggcctcgggccattcggcgttcgaggccgacaacgtggacgcgctggtgcgcgccaccgatggcttcgcctgatcggtagtgccggccgctggccggcaacgccttgccgggtcgtttcgccgccgcccgatgtggctcgccggccagcggccggcgctaccagttagccaaggcctcgggccattcggcgttcgaggccgacaacgtggacgcgctggtgcgcgccaccgatggcttcgcctgatcggtagtgccggccgctggccggcaatgccttgccggtccgtttcgccgccgcccgatgtggctcgccggccagcggccggcgctaccggtacccaagggttctgacgcgccgaaaccttcatccacgcatggcgtggatttaccaatccccggccagcaacgcgtcggccagcacctgcagctttggcgagtgctggcgcgacggtgggtagatcagcgacagcgcgcggctgcggccttcaagcggctgcagcacgcgttgcaggcggccgtcagccagcgcgtcggccactgcgaaatccatcacctgcacgatgccgatgccggcgatggccgcttccaccagcggatcgccactgtcgaacaccatccgcgtcggtggggtgaagtcgcgcagttggccctcctgcaggaactgccagtccaccagccggccactgcgcaggttgcgcaccgccaggcacgcgtgatcccgcagcgcggccacatcgtccggtgcgccacagcgggccagatacgcggggctggccaccgtcacccagcgcagcggacgcagcgggcgcgcgacgatgcgctggtcggcgatgacgccggtgcgcaaagcggcatcgaaaccttcctcgaccagatcgaccagacggtcactgagcacggcctccacctgcagttgcgggtgctgttgcagcaacggcgccagcagcggcaccagcaccttgcgcccgaacatcgagggcgcgctgatcttcagggtgcccgcgggcgtgcagggacggtcggccaactggcgttcggcatcctccaggccacacagcagcggtgccacctgatcgacgaactggcggccatccggggtcagcgccacgttgcgggtgttccgctgcagcagcttcacccccagcgtggcctccagccggccgatcgcgcgcgacaggccggactggctcaggcccagctgcccggcggcgacggtgaaactgcgggcttcggccacctgcaccagcatgcgcactgcattgaggtccatcgaagttccattcatgatgaaaatcatgacagatatggctggcagggggtttattgattcggtcgcatcaatgagactgcgctcccccaccgcgccagaccgccgatgcctcccctcaagtacccgcgctgggcgctgaccctgctggccactgcccagctgatcatcgccctggatgccaccatcatcttcgtcgccctgcacgacatgggccgcgcgctgcagatcaacgcgcagcagctgcaatgggtagtcagtgcctacaccgtggcgttcggcggcagcctgctgctgggcgggcgcgccgccgacctgatcggccgccgccgcttctaccggctgggcatgctgctgttcgcgctggcgtcgctgttcggcgcgctggcgccgaatgccaccctgttgatcatcgcgcgcgcggcgcagggcatcggtgccgcgttgctgttcccggccacgctggcgctgatcaacacgttgtatgcggaaggcccggtgcgcaactgcgcactggcgatctggagcatggccagtgcggtcggcctggcgctgggcacgctgctcggtggcgtgctgacccaggcgttcggctggccggcggtgctggcggtgatcgtgccgctggccaccgcctgtgcagtcgcggccggcgcgtggttgccggccgatggcccgcgtgtgcagggccgttccttcgatctggccggttgcctcaccgtcaccgccggcggcagcctgctggtcaccaccctggtgcaagggccggagtggggctggacggcccgcgccacgctcatctgcctgctgctttcagccgtgctgttgacggtgttcgtacagatcgaaaagcgcagccgtgacccgctgatgcagtttgcgctgctgcgcctgcccggcctgcgcgcggcactcggcctgaccttcgccttcatgagcagctatggcgtgcagtactacttcctggcgctctacttccaggatggttacggctggagcccgctgcaggccggcatggccttcctgctgccgaccgtggtgtgcaccttcggcatccgcattgccgaacgcatgctgcggcgccgttcgccacggcaggtgctggcctggggcttcgcggccggtgccatcggcatcactgcggtggcgctggcgatgccgcatggcgccggttactggccgctgctgccgggcatcgtggtgctcagcgtgggccagggcatgagctggacggcgatgtggatcgtggccgggcagggcgtgccggggccgcagcagggtgtggcgtccggcatggccgccaccgcacagcagatcggcggcgcgttggaactggcggtactggtgatggtggccaacgccgcgcgcggcacgcaggaggcaaccagccctgatgcgctgcagggcatggtcaatgcgcagtacggcgccgcgctgttcgccgcgctcggcgtggccatcgcgctgggcctgcgcccggcgccggtcgaatcggctgctgccgtccgcccggtcaacgaggcatgattgaaggcgttgccgtgggtggatgtgccacgcctgcggtggtgccggccgctggccggcaaccccggggtggttggatcattgaggttgccggccagcggccggcactaccgatacgggatgggaccacgcgcgttcaaccgaacgccagcaactgtggctgcaaggcgctgaagatccgcgccagccgctccgcccacgcctgctgcccggcggcatcggcgatcaggtcttggcggatctccagttccacgtgcaccaggccgcgcccttcgccgtgcaccggtaccgcgtagtcgctggtgctgctgaccgaatacggttcgttgtcacccaccaccaggtcgccttcatcgcgcagtgcctgcagcagtgcatgcgcaaagcgcgtgtcttggtggtacagcacgccggcgtgccacggccgctgcgtgccgttcatcactggcgtgaagctgtgcatcatcaccagcagggtggggcggccggcatcgcggcgtgcatccagttccgcgtcgatgcgcgcatggtagggcgcgtggatcgcatcgatgcgctgctgccgctgtgcagccgacagcctggcattgcccgggaccacggtgtggtcgctcacttccggaatcagcgtcggcgaggccagcgggcggttgcagtcgatcagcagccgcgaataggtctgttcgatcgcccatgcatccagccgttcggccagtgcgcgggtggtgccggcgatgccgatgtcccagccgatatggcggtccagctcggcctgggccaggccgagcccggtcagcgcgcgtggcacctgctggccggcgtgatcggccagcagcaggtacggcgaggcgccctgcggccggtggagggtatagatcgccgggtcgtcggcgcccagcagcgccggcagtacgtgcagatcggcgtcagccacgcgggcgcccgtccaggtggtgctcgatcatccacaggcccgcccaaagcttggcatccagctcatagccttcgcccatcttctgcaccagccaggccgccgcctgcgcgcgcggaatctcgtgcacggtgatgtcttcgctgtcatcgccgccaccttcgccgatccggcgcaggccggtggcgcgtacgaaggcgatcttctcgctgctggcgccggaggacgtcgggccgatcatcagcacttcggcgtgatcggcggtccagccggtttcttcttccagctcgcgcacggccgagacttcgatcgattcgccggcgtggatgtcgccgaccaggccggccggcatctcgatggtgggggcctgcagcggcacgcggaactgttcgacgaacagcaccttgtcctccggggtcaccgcgacgatgatcgcggccaggccgccggcatgggtacgttcgctgtattcccaggtgccgcgtaccagcatgcgctggtacttgccttcatagacgacacgcggggcttcggtgttgcgctggctcatgcgggctcgctgtgggtgggaagaatatcgggtacgccagcggcatcgaacagccggcggcgggtcatcgggccgaagcgcagggtctggcacaggccgccgagcagctcggggtcggcggtctggcgcagcaggccgggttggctgccttccagcggcgcgtccagcgcgatggtggtcagctggcgccagagcagggcgtgctcgcgctgctcgcgcaggcgcaccgccatctgggcggcaccgcgcaggcgcaggaacggcacttcgtccaggcgttcgtacagcgcatccaagctgccgaaatgggccagcagcacggcggcggacttgctgccgacaccactgacaccgggaatgttgtccaccgcatcgccgcacagcgccaggtaatcggcaatctggtgcgcgtgcacgccgtgccgtgccttcacgccggccacgtcccagcgctggttgcgggcgtagtcccactgttcgtcgtgatccagcagcagctgcgacaggtccttgtcggcggagatgatcaccccgcgatggctgccgcggtgcacgtgcagtgcgctgccgatcaggtcgtcggcttcgtagtcgtggtgggcgaggacggcaaggcccaacgccgcgcacagcgccttgcagtgcacgaactggcgcttgagcgcttccggtgccggatcacggttggctttgtaggccggatacaggcggtggcggaagccgctgtcgagcgcttcgtcgaaggcaatggcgatgtgccgcgggcgctcgcgctccagcaggtccagcaggaagcgggcgaagccgtgcacggcattggtcggccagccctgcgcgtcctggaactggtccggcagcgagtgccaggcgcggaacacgtagatgctggcatcgaccaggtacagcgacggcggcggtgccggcagggtcatgccggcggcgtccagtcctgcagcagggtcgctgggtcggggcgctcgcgctcgggcacgtcggccttggcggtgccgatgtggatgaagccggcgatgcgttcaccctcgaccaggcccaggtgggcctgcacgaccggatcgaaggccatccaggccgtcagccactgtgcgccgaagccaagcgcctgcgcggcctgcagcagggcgaagcagacgcagccggcggtcatcagctgttcctgttccggcaccttcgggtccgggcgtgggctggcgaccaccacgatcaccagcggggcgtggctgaaacgctggcggtccttctcgaacacggcctcgccggcatgcgggtcgcgctggcggctgcgcttggccaggaagtcgcccagagtgtgacgtgcatcgccggcgatcttcaggaagcggaacggcacgcgcttgccgtggtcgggcacgcgcacggccgacgccagcatccgctgcagggtggccgggtccgggccgggctcgcccagttgccgcgaaggcaccgagcggcgggcatccagggcgagcagggcagcggggtcgggcatggagtctgaaccggtcatcacgggtgtttgattatagtcggggtggtcaatgacgccgtctgtgtcgcgtccggcccctgaataccaaactgtgatgaacatcatgccactggcgggaaacggacagccgcttcccctcgcctcgtgggccttgcacggcttacgatacccctcttgccgggccgccggtcatgaggtttgaagtgaggactgtttcactgtccgtgacgggctggccggcctaccatcgacgttccggtacatggggtgtgccggtcgtcgcgatgtccatgctgtctgtcgtaccagagaaggtggggagccttcccgaatgatgagcgtgcccacaccgatgggatcgccgggccgtgacccggcccagctccagcttgcccgggacatggtcctgcccgcgctgtgccaggccttcggggccgcactggcgcgattcgacgatgccctgttcgaccgcgccggcaatgccggctcgtcgcagttgctgttcctggacgcgatgcgcgaactgcgccgccgccgtgaggagatcgctgccgccttcgccggccacctgcagcaggcgtgggccgcattggcggccggtgagccgctgtcggccgaggcgaccctgtcggggccggccgaggatggcctgagcctgctggccgaacacgtactggaatcgcggttggcggtgcgcaatttcgccactgtattgctgcgtgacttcaagccggtgctggcgcggctggaccgccgcctgggccggttgatcggcggcgtggaactggacgccgaccacaatcccatcagccccgaacatctgggcgtggccatccacgaggcctttgccggctgcgaactggccccggaagtgcatctggtgctgatcaagctgtgcgagcgcgacctgcgtgcaccggtcggccgcatctacgagaagctggacgagcagctggccgcagccggcgtgatgtcgcagatgggggctccgcagcgcccacaaccgccggcaccggatccgcgcatgaccgggatgctggatgacctggtcgagcatcgccacggcgcgggcgtcgatccggggttcagcgatgacgagcaggccgcaccggcttgggcgcagcgctttgccgcccgctggtccgagcgccgcgggcatatgcagcagcacctgggcggcgatgatggcgccgccggcgaggcctacgccggccagcaaggcatgctgctggaagcgttgcacgaactgctgcagcagacccgccatgtgcgtgaggacgccacgtctgcggcacaggtggcggtcggccagcagcgcccgctcagccagcgcgaaatgatgtcggtgctgtcgctgctgcaggccacgccgagcgcgaccctgcgcgcggccatcggcgaggacggcgaatcgctggcgcagcggctgaagagcgaagtgctgtccagcgccacccagctcggcgtcgatccgggccagacccggctggacccgcaggatgaggatgccatcgacctggtcggcatgctgttcgacgtgatgctggacgagcgtgaactggaaggccgctcgcgcgaactgatcggccgcctggtcgtgcctttcgtcaaggtcgccatgctcgaccgccgcatgttcgtgcagaagacccatccggcgcgcaagctgctcaattcgctggccgaggcctgcgagggcaacaccggcgagagccaggccgagcgcatgctgatggccaaggtcgaggagatcatcgagcgcctggtggccgagttcaacgagaacctggcgatcttcctgaccctggaagaagaattccgcgagttcctggtgcagcatcgccgccgcgtggaaatcgccgagcgtcgcgccgcagaaacgcagcgcggccaggaaaagctggaaatggcccgcacccgggccggtgcggaactggatcgtcgcatcggtgatgccacccttccgccggccattgccgagttcctgcgccagccctggcagcaccacctgaccctggcgctgctgcgcgagggcgaagaaggcgcgtcggtggccgaggcactgagcctcggcgacggcctgctggaggaagttgccgaggcacgccggcagattgtcggcaagccatggctgcaggcctggcagccggtgctggccaaggtgtttgccagcgtcggtgtgcacggcgatgcggctaccggtgcgatcgacgccctgcacgacacgttgcagggcatcgccgagtcgcggccggaactgcagcgcgcgctgcccgagctgccgcaggtcgcgctgccggcaccgccggtggccgaatcgccagcggtggaactcagcgggcagatcgatgccgacgatttcgacaacgccgatgccgaccgcttccgacgcatggaaatcggcaactggttggacttcgtcgacaaggacggcaaggtccaggcgggcaagctgtcctgggtcagcccgatttcctcgcgcctgctgttcgtcaaccgtcgcggcgtgcgcttctgcgtggcctcgccagaagagctggcggtgatggtgcggctcggccgcctgcgtgcccacgttgacgatggcgccttcgacagcgccatgcagggcgtgatcgaccgcctcgacccgggcagcaccaccctgcactgagtgctggctgcctgctaggatcgggaaaactcaccgatcagcggggacctgcatggccgtggcgttgctggggatcaaggagaccgcgccgggtgaacggcgcgtggcgttgacaccggaaaccgcgcgcaagctcggtgccctcggcattacggtctggtacgaggccggcgccgggctggccgccggcttcaccgatgccgcctatgacgacgccggcgcacgtgtcttcgacgcgggccgctgggccgagatcgatatcctgctgtgcgtgcaggcacctcctgcgacggtgctggagcagctcaggcccggtgccagcgtggttggcctgctggcaccggccaacgatccggcgctggccgcgctggcggccgatgatcgcctgcagctgttcccgctgcagcagctgccgcgcaccacccgcgcgcaggcgatggatgtactcagttcgcaggccggcatggccggctacaaggccgcgctgattgccgccgaacgcgcgccgcgcttcttcccgatgctgaccaccgccgctggcaccgtgcgaccggccaaggtgctggtgatcggtgccggcgtggcgggcctgcaggccatcgccaccgcgcggcgcctcggtgcacaggtggaaggtttcgatgtgcgcccggaaacccgcgagcagatccagtcactgggtgcgcgcttcctcgatcttggcgtgagcgcggccggtgaaggcggctacgcgcgtgcgttgaccgacgaggagcgcgccgagcagcagcgtcggctggccgaccacctgcgcggcgtggacgtggtgatctgcacggctgccgtacccggtcggccggcgccgaccatcgtgaccgccgcgatggtggagggcatggccaccggcagcgtcattgtcgatctggcggccgagagcggcggcaactgtgcactgacccagccggggcactgcatcgaacaccagggcgtgaccatcgatggtccgctgggcctggccagtcgcggcgcgacccaggccagtgagatgtatgcgcgcaacctgctcaacttcgttgcgctgttcgtgcgagaggggcggctcggtttcgactgggacgacgagctgctggcaaagacgcgctggcaggcatgaatgacgtggggtcagatccctttgcctctggcaaagggatctgaccccgatctcccgcaatctgccagggggcggatccctttgcgtcagcaacgggctctgaccccgttccccggggccttaccgcggcttcgccggcggcgggttgtcgcgcacccagtcccggcgctgctccggcgtcatctgcgaccagcgctcgcgcagcgcgtcgcgctgtgccggcggcatgttgcgcatctgcccgaacagggcgcgtgcctgttcacgctgttccgggctcatgtgctcgaagcggcgcaggccgcggcgggccttgtcgcgctcctccgggctcatcgattgccagcgctggccgtgcgagagcatgcgctggcgctggccggcatcagcgctgttccaacggtcgcgcagcggcgccagcagggactctcgctgggattcgctcaattgctcccacgcaggcaatggcgcgaccggtgcggcaggggcgggcgtggcgttctgcgccagcgccggaacggccggcagcagcgccagggtcaacagcagtggcagggcaagcagtcgggacatgatttactccatcgccaggtcggtatcgcccagccacaggtacagatctggattctcgtcgtagagcgcgccgttgtcttccactgaagcaagcacggggtccggcggcggacccgcaagcgtgccatggccggtgaactgcaggccgatgcccagtgcaaccaccagtgagcaggcgctggccagccaccagcgccagcgcccacgatgggtggtggccgtggcgccgtggcgagcttggtgcagccgggccagcgttgccggcgacagcgcctgcagcgactgcgcgtgcaggcggcgcagggtgtcatcggaaggcagggagcggttcacgggtgggtctccaggtagtcctgcagcgcctgccgggcgcgtgccagatgggtttttaccgcgccttcgctgcagcccatggcgcgggcggtggtggccccgtccaggtcctgcagcacgcgcagggtgaaggcctcgcgctggcgggcgggcagggtgcgcaacgcgtccaccagctgctggtactgctggcgctgctcatgtgcctgtgccgggtccgggccgggatcggcccagtcgatctcgccgccttccgcgtcctggttgtcgcgccagaacggcaggcggaagcggcgccggcgctgcaggtcgatcacccggcggcgcaggatgctccagaacagcggcgcccattcggcggccggcttgtcggtgtaatccagcatgcgcagcagcgcgtcctgcaccgcatccatggcgtcttcgcgctggcgcaggccggcctcggcgaagcggaacgcacgcgggccgacgctggccaggaatgcctccagcgatgccggcagggcatcggtctcggcgctcgggggggcggggctgctcaccagcacagggtacggttcctcgctcggggtcaccatcgacaacgcgtgagcggcgctccggttgacgccgggtgcgcgccgggttcagcccatggttatgatgggccgacgaagacagagcaggagcgttgccggtgagtgacgggttcgtagcgctgtacatcttcatgctggcggccatcgccggccacgtgatcatttcgcgggtgccggtgatcctgcataccccgctgatgtcgggctccaacttcatccacggcatcgtgctgatcggcgcgatggtggtactggggcatgcgcagacgccgctggagaaggcactgggcttcctggccgtggtgctcggcgccggcaatgccgccggtggctacgtggtcaccgcgcgcatgctggaaatgttcaagccgagcgcgcccaggggcggcaaggacgaaccgaaggagccgcaggcttgaacatcagcaccgtcgaactgctcgactggctggtcaaggccagctacctggtcgccgctacgctgttcctgctcggcctgcagcgcatggcctcgccgctgaccgcacgcagcggcatccgctgggccgggctgggcatgctgctggccaccgcggccaccttcttcctgcccgaactgcacaacgtgccgttgatcctggtggcactgctgctgggtgcgggcctagcctggtggtcggccggcaaggttgccatcaccgacatgccgcagatggtggcgctgtacaacggcatgggcggcggctcggcggcggcgatcggcgcggtggaactgctgcgctatgccttcctggcccaccgcgataccagccactggagcgcgcaggcgctggccgacctggccgcgcgccagccgtccggcacgatgctgctgctggcggtggtcggcgcggcgatcggcgcggtgtcgctgtccggctcggtgatcgcctgggccaagctggatggacggctggacaagcgcgtgacctggcccggccagcaggtgatgaacctgctggtggcgctggcggtggtggtgctggcgatcatcgcggccagtacgctcagtgcctgggcaatcgtcgccttcttcgtgctggcactggcgctgggcgtgctgatgacgctgccgatcggcggtgccgacatgccggtggtgatctcgctgtacaacgcgttcaccggcctggcagtgtcgttcgaaggttatgtgctgggcaacgaggcgctgatcatcgccggcatgatggtcggcgcggccggcatcctgctgacccggctgatggccaaggcgatgaaccggccgatccgcaacgtgctgttctccaacttcggcggcggtgctggtggcgaagcgcaggcgatcagcggcgcgcagaagccgatcgaagccccggatgtcgcggcgatgatggcctacgccgaacgcgtggtgatcgtgcctggatacggcatggccgtggcccaggcccagcacaagatctgggaactggcgcagcggctgggccagcgcggggtgaaggtgaagttcgccatccacccggtcgccgggcgcatgcccgggcacatgaacgtactgctggccgaagcgggcgtgccctacgacctgatcgccgacatggatgacatcaatccggagttcgccaacaccgacgtggtactggtgatcggtgccaacgacgtggtcaatccggtcgcgcgtactgatccggccagcccgatctacggcatgccggtgctggacgtggtcaacgcgcgcaacgtggtggtgatcaagcgcggcaagggcaccggcttcgccggtatcgagaatgcgctgttctacgctgacaatacccgcatgctctatggcgacggcgccgaagcggccgcctcgctggtgagcgagctgaaggcgctcgacggcgggcattgaagaccggggtcggatccctttccgcaggacagggctctgacccctttgccggccagcggccggcactaccggatccgcgcgtggcggctgcatctggtaggtgcggacctggggccgcgcgcttttgccggccagcggccggcactaccggatccgcgcgtggtggttgcctctggtaggtgcgggccttggtccgcacgcttttgccggccagcggccggcactacccccccatccgcgcgtggcgtggatctacgcgctcagcgcgccagccaggcgccgacgaccacggccacggccagccacagccattccatcgcgccattggccagggtgatcagggtccaggccaggtgcgggcccatccgcgtggtggcgtcccacaggtccagaccgatcgagccgcccatccaggcgctggcgatggcccagttggccacggcggccaccagcagagtgccgagcacgaccagggcgatgcgcaaccggcccgggcccagtgtgcccaggcgcagcatgaacaccagttccagggcggacactaccgccatccagccgacctgtcggccggtcatcagcgccaggaccatccaggcgaggggagcaacaagcagacccagcaacagcatgagggaccagagccaggtgacggtcctggcacgcgtggcaatggaggacatcgaagctccctgaagatcacccacaggatactgtggtttgccgcagtgcaccggcggtgccggggcggctgggctagaatgccgtcttgcgtggccccggccacggccccatatcggtccccatgtattcccgtagcagcgaacctgtccacttcgaacgcgattgcgaggccgtgatggtcccgcagggcgataccgtgaccctgcctgccggcagctatgggtacatcacccaggcgctgggcggcagctattcggtgttcgtcgagggcaacctgttccgcatcgccggcaaggacggcgacgccatcggcaaggaggcgccggcaccgctcgagctgccggccgacgccaccgatgagcaggtggaacaactggtgtggcagcagctgcgcacctgcttcgacccggagattccggtcaacatcgttgaactgggcctggtctatgaagtcgagatcaagcatctggacgaaggcaagcgcgagatcgacgtgaagatgaccctgaccgcaccgggctgtggcatgggcgagatcctggtcgacgacgtgcgcagcaagcttgaaatgatcccgacggtggccgaggccgacgtcgacctggtgttcgacccgccgtggaaccagcacatgatgtccgaggcggcgcggctcgagaccggcatgctttgacccagggcccgcagtgacgcgggcccggcactacccgcaaccagaacaggaatcctccggtgtcccagtccattcccagcttcgccgtcacccgttcggaccacccgcgcagcgctgaagagcgcgccaagatcctggagaagccgggcttcggcctgcacttcaccgatcacatggtggaagttcgctgggacaaggatgccggctggcacaacgccagcgtgcgtgcctacggcccgctgcagctggacccggccgcggccgtgctgcactacggccaggagatcttcgaaggcatcaaggcctaccgtcatgctgacggctcgatctggaccttccgcccggatgccaacggccgtcgcctgcagcgttcggcgcagcgcctggcgctgccggaactgccggtggagatcttcgtcgaatcgctgaagcagctgatcgccgtcgacagcgagtgggtgccgtcggccgacgagtcgagcctgtacttccgcccgttcatgatcggcgacgaagccttcctcggcgtgcgcggcgcgcacaaggccggctactacgtcatcgccagcccggccggcccgtactttgccaagggcgtggccccggtgtcgatctggctgtccaccgaatacgcgcgcgcggccaagggcggcaccggcgccgccaagtgcggtggcaactacgccgcctcgctgctgccgcagcagaaggcgcaggcgcagggctgctcgcaggtgctgttcctggacccggtcgaaggcaagtacctggaagaactgggcggcatgaacgtgttcctggtctacaaggacggcacgctggtcaccccggaactgtccggcagcatcctcgagggcatcacccgcgagagcatcctgcagctggcgcgcgaccgtggcatgaaggtcgaagagcgcaaggtcagcatcgacgagtggaaggacggcgtggcctccggtgcgatcagcgaagtgtttgcctgtggcactgcggcggtggtcaccccgatcggccagctgaagggcgagggtttctcggtgggcgacatcaacgcgccggccggcgaagtgaccatgtcgctgcgcaaggaactgaccgacatccagtacggccgcctgccggaccggcacaactggctggtcaagctgggctgatcgcccgcaccgggttgtagacccgagcgcgcgctcggctgcgttgttcctggaaagcccgtccctgtgacgggctttctgcgttgtggacaggtgggtggggtcagatcccttttccgtgggaaaagggatctgaccccacccactccgaccccgaatcggcggatgccgatgtcggcaaagtcatcgcaggacaggtgatgacccagtcaggtgtgtgcaggagatgagaaagttccttcaccttcacaaaccctcgacccgggaagtctcagaacgaacatttcatcttgctgaaaagacgctgaaaatcttgtggtgtccggttttggtcattagcgtcatctgcacggcggatcgatagggggatccgctgactcgccggacttcgaacctcgccaacgcaagccagcccatggttcgggccggtgcttctgccgattccggcattcacaccactagaaagggaaatacgatgtcccaggtaacgcaaccgcgtgtgcgtcgagtgtgggtggtccttggtgcgtccgttctgtcatcgctgctgctggccacgcctgcgctggccggtgacgtccagctcagcggcctgcagtccgcgccgacgcaccagcgcttcatcgtgaagtaccgcgacggtagtgcgccggtggccaacaccaccgcactggcctcttcgctgaagagtgccgccgccggcctggccagcagccagggccgtgcgctgggcctgcagcaggtccgcaagctggccgtcggcccgaccctggtcaggaccgaccgcccgcttgaccaggctgaatccgagctgctgatgcgcaagctggccgccgacccgaacgtggaatacgtcgaagtcgaccagatcatgcgtgcgacgctgaccccgaatgacacccgcttcagcgaacagtggggctttggtacctccaacgcgtcgatcaacgtgcggccggcctgggacaaggccaccggcaccggcgtggtggtggccgtgatcgataccggcatcaccaaccatcccgatctcaacgccaacatcctgcccggctatgacttcatcagcgatgccgcgatggcgcgcgatggcggtggccgcgacagcaacccgaacgacgagggcgactggtatggcgccaacgagtgcggctcgggcatcccggcgtccaactccagctggcacggcacccacgtcgccggcaccgtggcggcggtgaccaacaacagcaccggcgtggccggcacggcgttcaacgccaaggtcgtcccggtgcgcgtgctcggcaagtgcggcggctatacctccgacatcgccgatgcgatcgtgtgggcctccggcggcaccgtcagtggcgtgccggccaatgccaatccggcggaagtcatcaacatgtcgctgggcggcggcggcacctgctcggccacctaccagaacgcgatcaacggcgcggtcagccgcggcaccaccgtggtggtcgccgccggcaacagcaacaccaacgtgtcctcgtcggtgccggccaactgcgcgaacgtgatcgcggtggcggccacgacctcggccggtgcgcgggccagcttctccaactatggtgccggcatcgacatttccggcccgggccagagcatcctgtccaccctcaacaccggcaccaccacgccgggcagcgccagctacgcgtcctacaacggcacctcgatggcggcgccgcatgtggccggtgtggtggccctgatgcagtcggtggcgccgagcccgctgagcccggcacaggtcgagagcatcatcaagagcaccgcacgcccgctgccgggcgcctgctcggggggctgcggcgccggcatcgtcgacgccaacgcggccgtggatgcggcgatcaatggcggtggcccgaacccgggcggcaacgtgctgcagaacaacgtgccggtgaccggcctgggcgccgcgaccggtgccgagctgaactacaccgtcgccgttccggccggcagcacccagctgcgcgtggcaatcagtggcggcagcggtgatgccgacctgtacgtgcgccagggcagtgccccgaccgataccacctacacctgccgtccgtacctgagcggcaacagcgagacctgcaccgtcaacagccctgccgccggcacctggtatgtgcgggtgaaggcgtacagcaccttctcgggcctgaccctcagcgcccagtactgagcccaagtccctctccaagggcacgccctggcttcggccggggcgtttttgtccgggtgggtgccgacctcggccggcacgctgttcctcagaccgactcgaaacggttagccgccacgttcttgcgcacgtgctgcgggtcgaagatccgcccgttcatcgcgatgtacacgccgctcggcagcgactgcaccgcaccgatcgcacaaccgatgttgaactccgcatccgagccgcggaagcgtgccgggctcagcgcaccggtcatcacgatggtcttgtccgggatcgtcgccagcaccttgcctgtctgcaccatcgaatcggtgccgtgggtcaccagcacgtgccgggtgggctgcgcggcgatggtggcgcggatcagctcgcggtcttcgtcgttgatgtgcagcgaatccttgcgcaggatcggaatcacgttgaagcggaacgtcacgcccagctcgcgcaggatcatgccgatctgcggatcgccgatctggtagtccgacttgtcgtcgaagtagatcttgtcgatcgtgccaccggtggtgacgaccaggagctcttccatcatgtgcatgcgcgaaaccaggacagggactgcggcgcggggccaggaatgcagatgataaggccctgggcgcgcagcgtcagcgccgcttgccgaagcgggcgcgcaggccgggcaggctggcgctgaagatcaccagcagcgccagcgcgatctcgatcagcgccagccagcgcgtctccgggtggctccaggcgctcatcacgccgtggctgaaccagcccagcgccagcaccgaggcccagaagccggccttgcgccagcccaggcgcacggcgatggccagcgccagcggtggcgcggtgaacaccagctgggtggccagccagtgcctgtcattgatgaaccagcctgcgaacagcgcggccagccccatcagggccaacagcaggaccgtgcgcggcgcgcggttcatcgggccaaccgctgcgcgatgtcggccacccggcgccccagcgcgcgcgccagcaccgcttcgtcgtcggtcggctgcggatcgtcggcggcaccggccacgtggctggcgccatagggcgtgccgccactggtggtgtggctcagcgccggttcggtgaacgggatgccgacgatcacgcagccgtggtgcagcagtggcacctgcatcgacagcagggtcgattcctggccgccgtgcatcgaggcggtggacgtgaacacgccggccggcttgccggacagggtgccattgacccattcggcgcccagcccatccaggaagtgcttgaccggcgcggccatgttgccgaagcgggtggggctgccgagcagcaggccctggcagtcgaccaggtcctgcacgctcacgtagggggcgccatcgtcgggtaccggtggctgcgcggtctgggtcacggcggccaccggcggcaccgtgcgcaggcgcgcggtcatgcccggcacttcgccgatgccccgcgcgatctggcgcgccagccgtgccaccgaaccgccccggctgtagtacagcaccagaatctcgcccatcgtgcccgcttctcctcgtcgtgtggctaccagtatggctatcctgccagcattccgcatcgggtacccttccaccgatggaacctttggatacgctcaacctgtggatggagcgcgcgcgggatcgcgcacgggccatcagtttcggccgcttcctgtggcatcgcttcctcgacgaccgcctgttccaggcagcggcggcgctggcctacaccacggtgttcgcgctggtaccgctggcgatcgtggtattcggtgtgctgtcggccttccccgtcttcgaccgctggagcgatcagctcagcgactacgtattctccaacttcgtgccctccgcggcgcgtgcggccgagggctacctgcggcagttctcggccagtgccggccagctgacggcggccggcttcatcgcactggtggcctcactgctgatcacgctcaacagtgtggaagagaccttcaaccagatctggcgggtcggctcgacccggcccaagctgacccgcttcctggtctactggaccgtgctgaccttgggcgcgatgctcgccgccgcatcgcttgcggtatcggcgcgggtgttcgcgatgccgttgttcggtacccaggagggccgttggttggccgagctggcgctgcggctggcgccgatcctgatcgagttcgtctgcatcacgctgatgttccgggtggtgccgcaccacacggtgaaatggcggcatgccgtgcccggcgcgatcctggcggcggtcatcctggaactggtgaagtggggcatcggtgcctatctgggcagcttccagtcctaccagaaactgtatggcacggtggcgttcgtgccgatcctgctgctgtggatctacctgtgctgggtggcggtgctgctgggggcgtcgctggcttcttcgatggccgccttccgctaccagccggtggaactgcgcctgccgcaggggtatgagttctatggactgctgcgcctgcttggccgcttccagcatgcacgggccaagggcaagggcctggccgatgacgagatcctgcggctggagccgatgctgaccgattcactgctgcaggacctgatctgcaacctgcaggagatcgacctgctgcgccgcgacgagcggggcgagtggctgctgtcgcgtgacctggaccaggtcagcctggccgatctgtacgagtgtacccagctgcgcatcccggtggccgagcagcacctgccgtaccgtgatgacagcctgggccgtgccgcactggcggcgctggacgatctgcggctgcccctgcgcgaacgcctgaagcgcaaggtcagtgatatctataccgactctggagacatgccatgacccgcaagacgccgttgccgctgctgctcccgttgaccctgctgctggccctggcggcctgcaagccggcccaggagccgacaccggccagcagccagccgccggcacaggcgccgacgccgaccactccggcaccggtcgatgaaaccccggccgagcgcaccactgccgaattcccgaccttgaagatgaaggcggtggatggcagcgactacgatctggccgcgcatcgtggcaagtgggtggtggtgaacttctgggcgacctggtgcgccccgtgccgcaaggagatgcccgagctgtcggcgctgcatgcgatgcgcagcaacatcgaggtggtcggcctggcctacgaggacatcgaagtgccggaaatgcagtcgttcctgaccaagcatccggtgacctatccgatcgtgatcgtggacccgttcgatccgccggccgacttcgccacgccgcgaggcctaccgttgacgcatctgctggatccgcagggcaagctggcccacactttccttggcccggtgaccgccgccgacatcgaaaagcagatcgcggccgccaagtagtgggtgggtcggcagggcctgcggccctgcacctcggtacgcgccatcgcatgcgcgctgccgctcccacgcttcgctgcgcgaaccgcgggccccacttaccaacacccaaacccccgccgcttcgcggccgccccctggctcagggggggctctgccccagacacgatccgacgcccgccaggccaatgggattgccgatggggtcagatccgctttccgcaggaaaacggatctgaccccggttccatttcgatatctgacagatgtgtcgaccaaggtcgacacctaccaacagccgcagggatctgtcagaggcggggcggtgtgggtgggcaggaccgttggcgccatggatggcgccatcgagcccccagggacgggtttacggcgtgtcctgcccacccacaccgccccgccatcccgcggatgcccgctgttgccgttgccgttgctgttgcgttgagcaggtgcagggtgcaaccctgccgccccccttatccctcgaccgggaagtcctcgatcggcttcagcacatcgtagtgctcgcgatgcagcttgccctttagcttcggcagctccggcaacggcgcatccacccgtgtgtccggcaaccggtccagcaggttgcgcaccagggtcagtcgccccagccgctggtcgttgaaatccaccagcgtccacggcgccgcctcgcgatgcgtcgcgcgcagcatcgcctcgcgggcttcagtataggcgctgtacttgctgcgcgatttcaggtcgaccggggacagcttccagcccttcagcggatcgaggtggcgttcggcgaagcgcttctcctgctgctcctggtccacgcacagccagtacttgaacagcaggatgccgtcatccaccagcagctgctcgaacaccggtgcctggcgcagaaactgctggtactcggtttcgctgcaatagcccatcacccgctcgacgcctgcgcggttgtaccagctgcggtccatcagcacgatctcgccggcggcgggaagatgcgaggcatagcgctggaaataccactgcgtggcttcgcggtcggtaggcttgggcagtgctaccacccggcattggcgtggattgagatgctggctgatggcctggatcgcgccgcccttgcctgccgtatcccgtccctcgaacagcaccagcaggcgttgcccgctgagctgcacccagcgcgccatcgcggtcagttccagctgcagcggcagcagcagttcgtcgtagtccttgcgcttgtgcttggccatcgtcacaccacgcggggaggaagcccgagcgtaacgcaggggtcgctcaggtgttgtcgacgccctgccagccgtgttcaccggcaagccgctgcagcagggccgacaggtcgcgggcaaacccggccatgtcgaacaggccactgcgttcgcgcgcctgcgccagctcggcgcgaagcgaggccagtgctgcggggtcattgcccagtgcgctggcggtggcgatgaacgccgcatcatcggcgacattcatccgggccagccccagatggtggttgaggctgccggccacgcgcgcggcgaaggtgtcacccgggcaggtcagcaccgggcagccggcccacagtgcatcggaggcggtggtgtgcgcgttgtacggatgcgtgtcgaggaacaggtcggccagtgggtagcgggccaggtaccgcggatgcggcagcttggccatgaacaccagccgcgccgggtccaggccggcagcctgcgcggcggtgcgcaggcgggcgtcggcctggccggggccggacagcagccacagcaagctgccgggcaccgcctgcagaaccgcgaaggcgcggcccatgctgcgcgggttgagcttgtagctgttgttgaagcagcagaacaccacgccgtgctcgggcagcccgcactcggcgcgggacggcgacggctccagcgtgcgggtgttgtccgagggctggaaggcccgcggaaggcgcaggacgcgttcgctgaagtgcggttccagggctgccggcagtacgaattcgtcggcgaccacggcgtccagccatcgcgcgcccgaggtgccggggtaggccagccagttcagctgcagcggggccgggcgcatcgccagcacttcgggcgtgccgccgccgccccagccgcgcaggtcgaacagcaggtcgatgccctgtgcgcggatgcgggccgcgatgtcggcatgccgcagtgcggccacctcatgcagccgggtcgcggactgcaggcgttcgcggatgccgctgccatcggcgcggttcagcgcgaacaggtgcagctgcaacgccgggtcatgacgcaggtgttcgagcagggccacggtcagcagcccggtgggatgggcgccgaagccattggaaaggaagccgacgcgcaacgggccgcgcgcgcgtaccgtcactgccggcaagggccggaccgaggcggcgatcagtgcggcgcgcgcacgtgcacaggccaactgctcgcccgcgctggcgtcttcgctgaggaaggcgaagggttccaccgcaccgtggccggcggcgagcgcggcgcgtacctgcgcagccagcgtgtccacgtcctgccagtcgcacaggcggcgctgccatgccaggcgctgcgcggcgatgtagggttcatccggcatcagcgcatgcgcgcggcgataggccgctgctgcgccttcggcatcgtcggcgtcttccagcgcatggcccagccacagcgcgatgcccgggtgctgcggggccaatgccgaggcctggccaagcagcttcgccgcgtcggcgtgcgcgccggccatccaggccacgcggcccaggcgcgccagggcctcggggtggttcgggcgcagctgcagcgcgcgtcgtgccgcctgctcgccggcggcgatgtcgccggcttccagttccaggtcggccagcatcacccaggcgacgaaatcgccaggctggcgtgcgatcgcctgctgcaggtgctgtcgctgctgccaggccgacatcgtgctcagcccgccgacagctgggccagggcatcgacctggtgttcgtggctgagccgctgcagcagcgggtcgaggtcgccggcgaggatgttgggcaggtcgtacagggtcaggccttccacgcggtggtcagtgatccggccctgcgggaagttgtaggtgcggatgcgctggctgcggtcgccgctgccgacctgcaggcgccgcgattcggcctgcgcggcgtcttggcgctggcgctcggcatcgagcagctgcgccttcaggcgcttcatcgccttgtcgcggttggcgtgctggctgcgctcggtctggcactccaccaccacgccggtcggcacgtgggtgatgcggatggccgattcggtcttgttgacgtgctggccgccggcaccggacgagcggaacgtatccaccttcaggtcggccgggttgatgacgatgtcatcgacctcgtcggcctcgggaatgatcgccacggtggccgccgaagtgtggatgcggccctgcgattcggtggccggcacgcgctgcacgcgatgcgtgcccgattcgaacttcaggcgcgagaacgcaccacggccgaccacgcgcgccaccacttccttgtagccgccatgctcaccggggttgtccgattcgatctcgaccttccagccctggcgctcggcatagcgggcgtacatgcggaacagatcgccggcgaagatcgcggcttcatcgccgccggtgccggcgcgtacttccaggaacaggttgccttcgtcgcgcggatcgcgcggtaccagcagcagggccagttcttgttccagttcctgcaggcgcgcctgcgccgcggcgatttcctcgtcggccagttcacgcaggtcggggtcggcgcgcatgccttcggcggcggccaggtcggccttggcacgggcttcctcggcgagcgcggcagcgaccggttcaagttgggcgaattcgcgcgaaaggtcgcggaaacgggtgttgtcggcgaccacatcgggttcggcgagcaggcgttccagttcttcgcggcgctcggccagcgcttccagcttacggcgcagggtcggcgtcatcgggtctcacgggtgggtggcggtaacccggcgtggccgggaacaggcgctcggcggcgcgggtcaggtcggcatcgccactgagcgcggccgcgcgcagtgcggcggtcggcggatgcagcaggcggttggtcaggccatgggccagcagttccagcacttcgtcggcgggcttgccgttggccagctgctgccgtgcgcgctccagcagttcggcgcgggtcgcttcgccgaacgcacgcagctgccgcagcggtgcctggtgggcgctggcctgctgggtctcgatgaaacgcgacacctgcaggtcgatgatcgcctcggcctcggcggcggcctcgcggcggccacgacggttgtcttccaccgcgcgttccaggtcatcgacggtgtagaggaaggcgtcgttgagcgtgccgacctcggcttcgatgtcgcgcggcacggccaggtcgaacagcagcatcggcttgtgccggcgcgcgcgcagtgccttggccaccatctcgcgatggatcacaggttcgcgcgcggcggtggccgagaacacgatgtcggcctcgccgagatggcggtccagttcggtcagcggcagggccacgccgccatggcggctggccagttcctgcgcgtgggcaagggtgcggttggcgatcagcagccgccgcaccttgccctcactcaggtggcgtgcagccagctcgatggtctcgccggcaccgaccagcagcacggtggagtcatccaggcgcgcgaaggcgttctgcgccaggcgcaccgccgctgaggccaccgacaccgggttggcgccgacctgggtatcggtgcgcgcacgcttggctaccgagaaggtctgctggaacaggcggtccaggcgctggccgagcaggccgtggtcacgcgcggtcgaccaggcatccttaacctggccgaggatctgcggttcgcccagcaccatcgagtccagcccggtggcgacccggaacaggtggcgcacggcctcggcatcggcatgctggtacaggtagccctgcaggtcgcctgcctggctgtgcagccactggtccagcgcctgtgccgactcggccacggcatacagttcggtgcggttgcaggtggacagcagcactgcctcggcgatctgcggggtatcgcgcagcgagcccagcgcacgcggcaacgcctcaccggcgaaggccgcgcgctcgcgcagctccaccggtgcggtctggtgattcagtccgagcacccacagggtcattgttcagttgcttgcgataagctgctggccattggacgacattttaaggccccgatgccgacgatgcccgcattgattcgcatccccagtgttctgctgctgtccctggcctgcgcccaggccctggcggcggtgccggccaaggcccccgtgcgggccgcggccactgaggaactggcgctggaaccggtgatggccggtgagttcgccctgcaggccggcaagctggccgaggccgcgcgctggtacctgcaggccgcgcagcagaccgacggcgacgccggcctggccgagcgcgcgacccgtatctccatgctggccaacgatgatgccagcgccgccaagggcctggccctgtggcagcagcgcgccccgcgctcgttgaccatgcgcagcgccgccggtgcgctggccatgcgccagggcgatgtgaaggctgcccgcaccgagctgcaggcgctgctggccgaccccgacgagcgcggctggaagttcgccctggccgcgctgatcggcggtggccgcgacccggcggtgccggcgcaggtgctcggcgagctggttgatgccaatgcgattccgccgaagatcgaggcctggcaggagttcggtcgcctggccctgcgcatggacaagcccgagctggcgcggcgcatgatcgatgaagtggtcaagcgcttcccggaagaaccgcgcgtagcgttgctgcgtgccagccagctgcagcaggcgggcgagaccgacaaggcattgtcgctgctgcacgacgtcgagccgaagacccgccaggaccccgagctgcgcaatgcggtggccatcgcctacgacagcctgggccagccggctgcggccgagcgcgtgttggcgttcggcccgcaggacgtacagacctggggcatgcgcgcctcgctgctggccaagcagggcgacaaggcggcgctgtccaacctctacaacgagctgtcgcggcaggcggccaagccggatccggcgcagcgcctgttgctgggcaagatcgccgaataccttaagcgttaccccgaggcggtgcagtggtaccacagcgtgcccggtggcgatgagctgagcgaagcgcgcctgcgcgcggccaatgcccaggccctggccgggcgcctgccgctggcgctggaggaagtgcacgcgatccagtccgacgcggtggtcgacgacgatgtgcgccgtgacgcctacctgctggaagccgaactgcgccagcgtggtgacgacagcgccggtgaactggatgcgctggcccgcggcctggccgcctacccggacgacaacggcctgctgtacgcacgtgcgctcacctgggagcgccgcgacgacatcccgcgcgccgaggccgacctgcgcaagatcctggtgaccgacccggaaaacgtgccggcgctgaacgcgctgggctacaccctggccgatcgcaccggccgcctgcaggaagcgctggagctgatcgaccgcgcccgcgtggccgagccggacaacgccgccatcgtcgacagctatggctgggtgctgtatcgcctgggccgcaaggaagaggcactggtacagctgcgccgggcctggaccctggccaaggacccggagatcgcttcccacgtcggcgaagtgctgtgggtgctgggcaagcatgacgaggcccgccacttcttcgacgaagcggccaagctcgaccctgaaaaccgcgcgctgctgcgcgcccgtgagaaattcaatccatgagtggttccctgatccggccgctgctgttggcgaccgtgaccctggcggtgagcgcctgtaccagtgtcggcacgcagaagaccccggcgccagcggtggtcgagattgtttcggctgaagcggcgcaggccgaggcagcgcgcgtggccgcgctgcaggcacagccggactgggccttccaggggcgggtggcggtcagcaagggcaaggacggcggcagcggtcgcatcgactggaagcaggacggccgccgctacgtggtcgaactgagcgcgccggtgacccggcagagctggaagctgaccggcgacacccattccgaagccggtcgcctggaagggctatccggcggtccgcgcgatggcgaggacgcccagcagctgctgctggaagcgactggctgggacatcccggtcaatcagctgccggagtggatccgcggcctggtggccggggatgctgccggtccggaaaaggtcgagcgcgacggtgaaggccggccgcgccgcatgcagcagatgggctggcaggtgcagtacctggactggtacccggccgacgccggacgaccggcgctgccgcgacggatcgaggccagcaatggcgacgccaaggtgcgcctgctggtggaccagtgggggcagggcacgccatgagcgccgggcgcgacgacgcgggctggtcctggtggccggccccggccaagctgaacctgttcctgcacatcactggccgccgggccgacggctaccacgagttgcagaccgtattccgcctgctggactggggggaccgcatcggcctgcgcctgcgtgaagacggtcaggtgcgtcggcagggcgagggcttggccggcgtggccgaggccgatgacctggcggtgcgggccgcgcgcctgctccaggatgaggcgaagggcgcgcaaggtgctgacatcatcgtcgaaaagcacgttcctgccggtggtggcttcggcggcggttcgtccgatgcggccaccgtgctggtggtgctgaatcggctctggcgcgccggcctggacgaggatgccctggccgcgctggccctgcgcctgggcgccgacgtgccggtgttcgtgcgtggccacaatgcctgggccgaaggggtgggcgagcgcctgcagccgatcacgctggcgccggcctggtatgtggtggttgaaccgggtgttcatgttcctacgccggtcctgtttgcagacccggatttgacgcgcgacagcccagtggcgaaaatagaggacttcgcttccgggaccctggtcgggaacgcgttcgaaccggtgctgcgccgccgtgagcctgccgtcgaggcagcgcttgccgcgttgagcgacatcggcgcggcgcggctgaccggttcgggaagtggttgtttcgtcgagttcgcatcgcaggctgctgcagagcaggggcggtcgaagttgccgaaggagttgcgggcaagggtggcagcgggcgttgcgcgttcgccactgctggatgcactcgagcaacactgatttatcaatgcaggggcgtcgccaagaggcccaaggcaccaggttttgatcctggcattcgtaggttcgaatcctaccgcccctgccaatagcggctgtgtccgcgccttccagcgcatcgcccgcgcgggacgtggaaacaaccgcggtgttgtcagcagcaagggtccatcggggtccttgccgactccggatccccgccactcgtccccgcccgagacaatcatgatgcaagagtccccgaacctgctggtcttttccggcaacgccaacaaacgtctggcgcagaacatctgcaaggaactgggggtccgcccgggcaaggcgctggtgtcgcacttctccgatggtgaagtgcaggtggaaatcgaagagaacgtccgcaagcaggacgtgttcgtgatccagccgacctgtgcgccgagcgcggaaaacctgatggaactgctggtgctgatcgacgcgctcaagcgcgcatcggtggccagcgtgaccgccgtggtgccgtacttcggctactcgcgccaggaccgccgcatgcgttcctcgcgcgtgccgatcaccgccaagctggcggccaagatgttcagcaccgctggcgctgatcgcgtgctgaccgtcgacctgcacgccgaccagatccagggcttcttcgatattccggtggacaacgtgtatgcgtccccgctgctgctggccgacatctggcgcgcctacggcaccgagaacctgattgttgtctcgccggacgtgggcggcgtggtccgcgcccgtgcggtggccaagcgcctggatgacgccgacctggcgatcatcgacaagcgccgcccgcgcgccaacgtctccaccgtgatgaacatcatcggtgacgtcgaaggcaagacctgcgtgatggtcgatgacatcgtcgataccgccggcaccctgtgcgccgctgccgctgccctgaaggcgcgcggtgcgctcaaggtcgccgcctactgcacccacgcggtgctgtcgggcccggcggtggacaacatcaccaattcccagctcgacgagctggtggtgaccgacaccatcccgctgaaggacgcagcgcgggtgtgcagcaagatccgccagctgagcgtggcggaaatgctggccgaaacgatgcgccgcatcgccttcggcgagtcggtcagctcgctgtacgtcgactgagttttcgtccctgccggcaacggcggggacatacccggatgcttctggtcgcggaagcatcttcaaccgccacgccgcagggcgcggcaacaacctgagtagtcgaaaatgtcgaagacccatgaaatcaaggtcaccaagcgtgaactgcagcgtaagggtgcgagccgccgcctgcgtcacgctggtgtgatcccggccatcgtgtacggcggcaacgccgagccggtcgccatcagcctggaccacaacgaaatctggctggcccagcagaacgagtggttctatgcctcgatcctggacctgaacctggatggccaggtgcagaaggtcctgctgcgtgacatgcagcgccacccgtacaagcagctgatcatgcacctggacttccagcgcgtgaacgagaacgaagccctgaccgcttcggtcccgctgcacttcgtcaacgaagacacctcgccggccggcaaggctgccgacgtcgtggtcacccacgaactgaaggaagtgaccatcacctgcctgccgaaggacctgccggagtcgatcgaagtcgacctgggcgagctgaaggccggtgacgtcgtgtacctgtccaacatcaagctgccgaagggcgtggaaatcccggcgctggcgctgggcaaggaccacgacgacgccatcgtcaccgccaaggccggcaaggccgacgaggctgacgaagaagcggctgccgccgagtaataccgttacggtgcctgcctccgggcaggcaccgtactggaaggaaccatggcaggactgcgactgatcgtcggtctgggcaatcccggatcggaacacgcccggacccggcacaatgccgggtttcatttcgttgaggccctggcggaaaaagccggtgcgcgatggaatgtggacagcaagttgttcggcgagaccgccaaggtcgagatcgccgggcagacggtgtggctgctcaagcccgccaccttcatgaacctcagcggcaagtcggtcaccgccgcgcagcggttctggaagatcgagccggaggaaaccctgttggcccacgacgagctggacctgccgcccggtacggcgcggcttaagttcgacggtggccacggcggccagaacggcctgcgcgacaccatgcgcctgctgggtcatggcaaattccaccgcctgcgcgtgggcatcggccatcccggccacaaggaccgcgtggtgggttgggtgctggggcgcccgtccaaggaggatgacgtgctgatcgcgcgcgccatcgacgatgcgatcgacgtgctgccgctggcggtgcagggcgatttcaacgaagcgatgaagcgcctgcacaccccgaaataaccggtaggtatcgaccgttggtcggtacggaaccaaccaggccggtaggtatcgaccgctggtcgatacggagccaaccagagcggtaggtatcgaccgttggtcggtacggaaccaaccagaccggtaggtatcgaccgctggtcgatacggagaatgattggaaaagcagcgcccaggccgctgtttccccaatcactttcaccccagagagctgtcacccatgggtatcaaatgcggcatcgtcggcctgcccaacgtcggcaagtcgaccctgttcaatgcgctgaccaaggcgggcatcgccgcggcgaacttcccgttctgcaccatcgaaccgaacgtcggcatcgtgccggtgccggatccgcgcctgaacgagctggcgggcatcatcaacccgcagaaggtcatcccgactgcggtcgagttcgtcgacatcgccggcctggtcgccggtgctgccagcggtgagggcctgggcaacaagttcctggcgcacatccgcgaagtcgatgcgatcacccacgtggtgcgctgcttcgagcacggtgacatcgtgcacgtggccggcaaggtcgacccgatctcggacatcgaaaccatcgacaccgaactggcgctggccgacctggacagtgtcgagaaggcgctgaaccgtgccgagcgtgcggccaagggcggcgacaaggatgcggcggcgcgcaagccggtgctggccaagttgcaggctgcactgtcggagggcaaggctgggcgctcggccgggctggacgaggaagagaaggcgctggtgcgcgacctgttcctgctgaccctgaagccggtgatgtacatcgccaacgtgctggaagacggtttcgacaacaacccgcacctggaagccgtgcgtgcgcatgctgccgccgaaggtgcgcaggtggtgccggtgtcggccgcgatcgaagaagagctgtcccagctcgacgacgaagaccgcgataccttcctggcggacctgggcctgagcgagccgggcctgaaccgcgtgatcaacgcggcctacagcctgctcggcttgcagacctacttcaccgccggcgtgaaggaagtccgtgcgtggaccgtgcgcaagggcgccaccgctccgcaggctgccgccgtcatccacaccgacttcgagaagggcttcatccgcgccgaaaccatcgcgtatgacgacttcatcaagtacaagggcgaagccggcgccaaggaagccggtcgcctgcgcctggaaggcaaggagtaccgcgtgcaggaaggcgacatcctgcacttccgcttcaacgtctgatcctgcggcatcggatcgaccccggacgccccgccctgtgcggggcgttcgcgtttccggtgatggacaaaaaaacaccaggctgcgaaacgcttgcggtgtgacgttcgccggtacttgtccacagcaaactcccatcgctttccacgcgtggtgtggaaaaccccgcgcgcctctgtagagccgagcctgcgctcggctcaggttgccatcagccgagcatgggctcggctctacgaggcttggcggtgcggtgtggacaaattttcaccacgcttcgaaacgcctgcggtgcaatgctcacaactacttgtccacacctagttcccatcgctttccacgcgcgttgtggaaaagaactgcagacgtggacaaaaactcaccacgcccggaagcgcctgccctgcaacgctcgaacccacttgtccacaccaaacccccatcgctttccacgccgcatgtggaaaaagtgcccggcattcccttgccgggcacgtcccgcgtcaccaggtgtacgacacgcccagctgggcaccgacgtcgtggaagcccatgccaccgctctgccggctcagttcaccccagccgcgccagccgccggacagatccacctgcacgccggccttggcttcgtagatgtcacgcggcaactgccgctgcaggcgctcgccgtccattgtcaggcccgcaccattgccgccggaccaccagttcaccgccacgtacgggtgcacctggccctgcgccgggctcaacccacggctgtacaggcgcaggccgaggcgggtgctggtctcgccaccaccgcggtcctcgactaccgtgccgttggcctcgaccacgcggtcgctgtcatagcggctgtgcaccacctgcacctgcggttccaggtagatgccgcgctgcgcggtgcgccgcaggggcagcacatagccggcctcggccgacgcactccagttgcgggcgtcatagcgctccttctgcaggccttcgccctgcacgctgttgcggaagcggccgtattgcagccaaccatccacataggcgccgccttgcatgtgcgcatcctgcagccaggtagcataggcacccacgctggtgccggtgaccacgccacgcgcggtgtagccggtcacctgcgagcggctgtcattgcgcgcgcggccgtggccgagcatcgcaccggcctgcagctcgcccgtgccacccacttcgaagcggcggccgacgccgaccagcatgctgctgatctgcccatcgacctggacctggcggttgcggtcgtggctgtcgggctgcgcgctgcgaaggtgcatccaggccacggcatcgccgctggcactggccacggcggcgggatcaccggcgcggtcgtgcaggctgtgccggaacatgcccagtgcggcgctgcggttggccaggtaggccgccggttccgggcgttcaacctgcgggcgcggcggatcgatcggcggctccggcggcaatggtggatcgatcggcggctccggcggcaacggcggatcgatcggcggctccggcggtgacggtgggtcgaccggcggttccggcggctgcggcgggtcgaccggcggatccggcggctgcggcgggtcgatcgggggatccggcggctgcggcggatcgaccggcggcacgtattccgagcgcaggtaccagttgccatcgtccggggtcgacacaccgcccttgaacaggaagtagtcgtaggcaccggcaaccgcgcgcccctgcaggctgaattgtgcatccgactggccggccacggtgatcaggcggatgccctcctgggtcagcgcaccggcgccgccggcattgcgcacactcacgctggcggtgccgctgctgttgccgttgatcaccagctggtcgcccagcgaagtgtcgtcgcccagcgcgcggttgaagatccactggccaccgttgcccacgtagtcgccgctgacggtaacggtcttgaaatcgccggccgccggcgcatcgaaagcgatggtgccggcgtgttcgagcgtgccgacgctggaactggcgcgtacgttccactggctgctgccatccagcgccagttgtgcgacctggtagccggagtcgttgcgcagggcgccgctgaacgtggtgccgttgcccagcaccatgtgcacctcagccgttgcgctgtcgaccaccacgtcaccgcgcagcatgctggcgtcggcgctgaagtcgatgcgactggtcgccacgctgctgccatcggtgaataccgtgtcgctgacccgcagcaggcggccgctgccgtcgcccgcagtcacatcgctgccattgacggtcagtgcgtgattgctgccctgcagccagaacgcggggccactggcggtctcgatgtggctgtcattgaaggtggcacggttccagtacgggccgaacgcggtcaggtaggagcggtagccgccgctgttgctgccggtcatgcggatgtccaggcggtcggcctgggtcaaccgcgcggtgttcatgtgcacgatgccgaacacgttctcgccatcgctgcggatcgcaacggtatcgagcagcgcggtggcggtggagccgccgatgaacacgccaccgccgccgttgccgcgcacgtcgatcacgctgccgttggcttcgatgcggctggcggtgctgccggtggagccggtcacgcgcacgccgtaggtcgcatcaccgtgcgtggtgatccggccaccctgcacggtggcaacgccgccggcgatctcaacgccataaccgtaggtgtcggtccaggtgtcgatgctgctgtcggtcagctgcaggcgcgactcatcgctggccagccagaatccggagtagccatcacgaacatcgaacgcggcatcgcttgcggtcaactgtccccagctgttgatgttcacgccatagccaccgacggtgtagaagctgccgccgttgatcactgcactggaataggtcttgctgatgcggctgccgagcaggcgcatgctgccgcccaccgaatgggcttccacgttctccagcagcaggctgccgccgctgtcgatatcgaaccaaccgccctgcaggtaggtgtcgtacagctcggcgcggctgcccacgccgttggccgccacgccggcaaggatgccaccgggggcgagggtgatgcggctgttgcggatcgtcagcaggccggcactgtcggcgcgcaggcgggcaccgccgtcggcgctcatccgcagatcggccaggtgcagctcgctgcccttgccggatgcaccggccagcgtgccaccggtcccggtcattgaaagactgcccccggcatagtggatcacgccaccgttgtaggcctgcacgctgccgaatccgctgccgttgcgcgtggcatcgatgtcgacatcgcgcgcatcgatcacgctgccggcaccattggcatacagcgcatagaagcccgtcccggtcgccggtgcgatcgacagcgttgcgtcgcgcagctgcacctggccaccattggcagcggacacgccgctgccattgccggtcacgtggatgcggctgccgtcgatcagcgcattgctgccggtaccggtgaccgcaagtgcgaagctgcccgcactgtgggtgaggacgtcgtcggcacccagctgcagggtgtcaccgtcgttgaccagcagcgggccggtgaggtctgcggcatgcgccggcagggctgcccacagcgcagtggccaacaggctgggaatgaggggtacgcgctttccgtgcgcgcgcccgtacgcacggccgtgccgtgtgggggaggcgttcatgctgatggacttcctgtggcagggcgcagcgaggctgcgcggactgacgcggcagggccgcgtcgctgcggaagtcccacgccacggcaattgcaggcgccatcggacttccgtcccccacggcgatgcggcaacagccggcaggcgcaccttggcgggatgtctccagcctagaaatcggcactgtccgatggaatcaggcgtttcctaaagcggttgcaggccccgtcgcagggccggcgggattcagccgggagtggcctcagccgaacagcgaggcctgcaggcagtactcgatcagcgcctggtcgctgtccacaccgagcttgcgcatcgcgctgatcttctgcgtgctgaccgtcttggcgctgcgctgcagctggcgtgcgatgtcgcccacgctcatgccactggtgaacaggcggatcacctccagctcgcgcggcgacagccgcgcacggaccgcatccgcatcggccggttcgctcgcagctaccggcagcagtcccggggggcggtagacgcgatcggccagcaccacgcgcagggcctgtaccaggctgcccaatccatggctcttgagcaccacgccaccggcgccggcggcatacatcgccgcgaccaacgacggattggacaccatcgtcagcaccagcaggcgcgtctccgggaagctgcggcgcaggaacgagatcagcttgatgccgtccccgaagcgatcgcctcccggcatgctgtagtcggtgatcaccgcctgtggccgggtccgggtcatcagctcgatcagcgtcgccggatcggccgcttcgcccacgatgtccaggtccagttccccggccagtacgtcgcggatgccggcaagcacgatcgggtggtcgtcggcgatgaggatccgtgtggtcatggcagggtcgggtcgtcgggaagggagggggatgcagcgtcgcgcaacggatgcagcagccgctcgaggcgtcgctggaacccggcaagagcggccgcctgggtggccaggtcatcgccgccggcaaggcactgttcgatctgcaggccgctgtcgaccagcgcaggtgcaccgacgatcaccagcgcgccgcggatgcggtgcagaacctgcgccaccctggcgggatcggcagcggcgatcgcctggcgcaggctgtccaggtcggcctgcatggtctgtacgaacagcgactgcatcttcgcgggaacctgcagcgggggatccttgtcgtgcgacgcagtggacgcagggcgctcctgcatcgcgacggccggtgcatcgccgtcggtgatccgggtcagcaggcgctgcagggcttccagcgtgatcggcttgaccagcacgccctgcatgcccgattcctggcagcgttggcgttcggccgggtcggcattggccgtggcgccgtggatgggcacgctgacaccccgtgcccgcaaggcacgggccaggccgtagccatccagcccgggcatgttcaggtcggtcagcaccagcgcgaacgccccttgctgccagtagcccagcgcttcattgccatcgctggcgaccacggcgcggcagccgagctgttccagctggtcgcgcaggatcgcctggttgatcgggttgtcctcggcgaccagcacctgcaggccgaaatggcgcgtcgccggcaggcgcccttcggcgctggccgccagcggttggccgctggccgcggccaaggccagcacgatcgcgtcgaatcgatgcaggccgacctgccaggcgccatcgacctgccgtggccgcaccccgccttcgcggcaggcgatcacgcgcggtccacccgcccatgcgggcagagggtcgtccagcaccagctcgagcagcacggcggacgatggcaggcctgctgcgctgtcctcccggtacacgctggcctgtgcaccgcgctgctgcaggcgctcgcacagcgattgcaccagttcgcgcacgctgccccgcacctgtacctgcaggccggcgggtagttgcggcggcggggcctgctgtggatccggtggagccgagggcagcggcagttcgacgctgaagctgctgcccaggccgctctcgctgaccacgcgcagctggccttccatcaacgccacaagatgcgcgcagatggccagccccaggccggtgccgcgcatcgcatcggtgcccgggttggcctggaaaaatggctcgaacagatgcgcctggtgttcgctggcaatgccgataccggtatcggccacctgccattgcagccagcagcgttgctcctgccagcgtgccgaaacacggaccaccacgcgcccgctgtcggtgaacttcagtgcgttgctgatcaggttgttgagcacctgtcggatccgcgcggcatcaccgcacaccccgggcggtacgtcggcatcgatgcaggcgtagaactgcagccccttgttggcggccgcggcagcatacgagtcgagcgcgtcctcggtcagccgcactggatcgaatgggcttggctccaggctcagttgcccggcctcggccttgctgacatccaggatgtcgctgatcagctgcatcagggtcgaggacgaacgctggatcgttgcaaggtagtcctgttgccgtgcatccagtggcgtcagccccagcagttcaagcgtgccgagcacaccgtacagcggcgtgcggatctcatggctcatcgtggccaggaactggctcttcgcgcggttggcctggtcggcggcgcggcgcgcctgctgcagcacctgttcggcttcatgctggctgctcaggtcaatgaacaggcacagcaccgccggctcaccgcgatagcgcgccggtgtcgccgttaccagcaggtggcggccttcgggcgtggcgcaggccaggccatcgcccagcgtggtgccgccggcagccagtacgctgcgccgccacgggccatgccagccgccggcatgatagtcctcgcccagccagcggcgggcgagggcgttgtccagcagcacattgccatcggtacgacgcagcaggcacagcccgatcggcgcgttgtccaggatcgtgcgactgaaggcttcgctttccagcaggcgcgcgtggttgctgcgcagcggctcgatgaccgaacgccggtacgcgcgcagcaccagcgtgccgcccagtgccagcagcagggcgaccacggtcgcgcccagcaatggcccctgcgggtgctggaacacctgccgccagccgacgtggtagaccgccagccagccgcgctcgctgcgcatgcggaactgcaggccagcgaggccggcctgccaggaggtgccagcctcgctggcatcggctgcatcgcccagcaggcgctggccgttggcatcgaacagcgacagccgctggaacaccgggacacccagcacctggcgatagtcatcgacacggccaggatcgagcaggcaggccagtgcggcctgcgagtccttgtcgtcctcaccccacaggcgcgcatcctgcggggcgttggcgatggccagcagccaggtctgccggtcgcgccatggcacgcccacccagacgatgccaccacgttgcaccgccggtcgcgtacccagcacccggtggatgtcggcgatcgccggacgcaggtgatgcgggctgttctggctcgcgtcggtaccggcgatctgtaccggtgccagcagcccgcgcgtgccctggccatcgaccagcaggcattgcggcggtggatagcgcgaggccgaccagaacgtgccgtagaagcgcaggaaacggtcgcccagttcagtcggtggcgaaagactggccccctcgcttccgatcaccgcaaagttggcgaacaagggcccgcgttgcagctccacgctggcatcggcgaccggctgcccatgcgtgccgacatcatgcagccgccactggcgcagaaagcgctcctgctcgcgcagcgtgccgtccaggcggcggaagtggtactcgatcttgctgcgctcttcgttgaacagctgcgagccggccgacagcagcagtccggcctgcagcgtggccagcaccacaacgccgatcagcagggcgtggacgcgcagtgagcggcgagcgagtcggcgtacaggagcggcctcggccggcatggcaggtctcagggcaggaagcggtcagcggcaccatgggcagcaacggagggacatccgccaccgctgcacagacaggatcgtcaatgccacttgatgatttcgtgaagcggacgtggaatccgtgtcagcgcagggcggctcgcggcgactcgtccaactgcggcgcttcttcgtccagcaggcgggtgaactcgtccgacggcagcgcctgcgagatcaggaagccctgcacctggctgcaccccagctggcgcagggcagccaggtcggcatcgctttccacgccctctgccacgatggtcaggcccagctggttggccagcgcgatcaccgtcgtcagggtcaggtgcaaggccgggtcgcgcgcgcatccgctgaccagcgcgcggtcgatcttgacctcggtgaaaggggtattgaccaggttgtggaccgagctcaggccctgcccgaaatcgtcctgggccaggccgaagcccttcatgcgcaggcggcaggcgccggcatagaagtcgctgacgtgccgcgtggtgctgttttccatcagttcgaagcacaattcaccgggcgtaccgccgttggccagggtcagtgccagcagttcgtcgggcaggtccgactgctccagcaggtgagggggcaggttgatcgataccggtacccggaacccttgcttgcgccagcgtgcctgcgcgctgatgctggccttgagcatcatccgcagcagatcgccctccagcccgtagcggcagattgccggcaggaagctgccagcggccagcgtgcccagctgcggatgtcgccagcgcaccagtgcttcggccgccaccacgcgtcctgactgcagtgacttcttcggttggaaccaggccgtcaggctgccatcggccatggcctggcgcagctgcgatgcatccggttcgggcgcagccgccgcgcgcgtaggggcctcgccggcggccggacgcgcctgcgccaaggcctcgaacagggcgtccacatcggcggccgccaccggcttgggcagcaggccgaccacatccagccccagcgattcggccatcagccgtgccgaggtcatcatccgccgcggggccgcgctgaccaccgcgaggcgtggcgggcgcggctgtgccgccagcgcctggatgaactggatgccgtcctgcccgggcatcagcaggtcgctgaccaccaggtcatagggctggcacgcacacagcgcgatggccgcatccacgtcttcgcaggcgtcgacctgcacgcctgcgtggctgccgaacagattggccaggaaaccacgctggaagggctggtcttccaggatcaggacacgctgggtcatgcggggtctccttggcgcagtgaggtgagcgccttgcgcaggcgtgcgatgtcgatgggtttgctcaggtagccctgcatgccactggccaggcagcgctcgcgctcctcggcagtggcattggcggtggcgccgatcaccggcaccgggttgccgtcctcgcgcagttgccgggccaacgcgtggccgtccatgcgcggcatgttgatgtcggtcaccaccaggtcgaaagactgctctcggcatcgctgcagggcttccacgccgtcctgtgccagctccacgtcgcagccgagggtgcgcagctgctcggccaggatcacccggttgatcgggttgtcttcgacggccagcacgtgcaggcccagcggcatcggcgttgccgcgcgcgatgtttccggcagcgccgcacgttgctgctgcacgttggccagtgcattgccgatcgcggtcatcccatgcagggtcaccaccaggctgccatcggcggcaacggtgggctggtcgccgccgtcgatcgatgccaccacgcgagggcctgcccaggccagcggcatcccggcctcgccgtccatcaggatcgcgccgtcatggtccagcagtgcagggtcgccctgcaggggctgtgcgttggcaccccagcgacgcagccagccgcaggcactgtcgaccagttcgcgatcacggccgcgcaccaggatcggcggctccggcagcagggtcgggccatcctcggcggcggccagcaccggcaagggcaggcgcacgctgaagctgctgcccaggccgggctcgctcaccacctgcagctcgccgctcatcaggcgcaccaggcggtcgctgatggacaggcccagcccggtgccctgtgcactggccgcgccgcggacctggcggaacggttcgaacaaccgcgcctgttcctccgcggcgatgcccacgccggtatcggtgacctgccaggccagcacgctcgattcaccttcgcgctgtacctggcgcacgcgcagtaccacccggccatgctcggtgaacttgatcgcgttgctgagcaggttgcccagcacctggcggatgcggtcggcatcactcagcacgcgcgtgggcaggcgcgggtcggtgcagaccaggatctgcaggcccttgcaggtggccgatgcggcgaagctgcgcagcacgctctcggtcagctcgcgcggcgagaacggcgccggctccaggctgagctgcccggattcgatcttggaaacatccagcacatcgctgatcaactgcagcaggaccgatgaggaactctcgatggtgcgcaggtactgcgactgccgggcgtccagcgaggtgtgcccgagcagctccagcgtgcccagcacgccgtagagcggagtacggatttcatggctcatggtggccaggaacgcgctcttggcctggttggccgcatcggcggcctggcgtgccgacgacagcgcggcctgtgcctggcggtgccgggaaatgtcatggaacacgcacagcagcacgtcgtcgccctggtagcggcaggccgcgtgcagcacctgcagctgacgaccgtcgcgggtggtgaattccagtccacgcccgcgctcgccggcatgtccgcgccatggcgcctgccagtcgctgtgttcgccttcttcgccaagccagtcgcgtagcagctggttggagagcagcagcgcgcggtcgctgcggcgcaggacgcagatgccgaccggcgccatgtcgatcaccgtcgaactgaaatccaggttctccagcagcctgcgctgttgctgcagggccggctggatcagctggaggtccacgcgatgccgcagcaggcgcagcgcgacgccggccagcagcagcaacagcgcgcagaccagcagcggcaccgccaggtcacccagcagcagttgcgacggcaggtggtagaccaaccgccagccgtcgttgccgacacttttcaccagcgctacaccgcgcggaagcccgccactccacagcgtgccgaagctgtcgtcctggcgttcccgcagggtcttccagcccgcaccatccagacgcggggtctggctggacaatgccggctgccctgcacggtcgagcagcgcatagccgccgatgccctggccgtcgatcatgctcgccgccgccgcgccatcgagcagcagcaccagccactgcgtcggatgcgggccggcctgtaccggctgcgccaatgcaacgccactgtcacccgggcgcagccagtgcaccgggtcggccgcctccaggctgccgctgcgtgcctgcagcgcacgcagcgatggcaggtgcgccaggtccacgtcgacctcgccgccggccagccagtgcgtgccgtgcgcatcgaccagcagcagatgcgtctgcagtgcctgcagcgtgtgttcggcgcgcgctgacaacagcagccgctggcccggttggccgccagcaccatccagcggcacctggcgcatgccttcgctgtccgccgcaggtgcatccgggttgcccctcaccaccgaatcgcccagatagcgcagcagggcttcgcgctggtcgaaatagatctgggccctgtaggccgctgcattcatctcgcggcgatgggtcgagatgtcctcggtgaatgccgtgagcaggtagaagccggccgcggcggccaggcagacgaagacgcacacggtcaagcagcgcagcagcaccgacgcggtggtcgatggcacggcctgctgcagcgaagggcgggggaagcggaacatgcaacgatgctagggagcggcgcgcgcggcgcggaatcagctgtttcctaaaatccccggctggccggtcgggccggagcctgcgcgcgggtaccgttcaggcggcggaaaaaaagaacccccgccgaagcgggggtctcctgtatcggcgctggccgggcgcttacagcgcgctgccaccgaacttgtgggtgtactgcaggttgatcgtgcgccccacgctgtcgaaccaggacacgtcgtagtacgggtatgcagtgtaggtacggtccttcggcggcatcttgttgaacacattgaccaccgacagcgacaggcgcgagtggtcgtcgaagcggtactgcagcgaggcgttgtagcgataggtcgccttcacgtacgggctgtcgccgctgtcccagtcgaacacctggtcgtagctgtccgaggtcggcagcttgcccaggcgcgaaccgtacaccgttgccgaccacgcatccttttcccaggtcacgctcaggctggtcttggtgcgtgggatgtcgaagccgctgttcactgcgaactggtcttcggtgcggtcgcccgggtagcgctggaagtcatgcttcttcacccaggtgtgggtgccgttgaagatgaagtcgccgatgcccgtctgcaggcggtagcgcaggccgacgtcgatgccggaggtggattcgcgggcgacgttgatcggcgccacgcgcacgccatacaggcgcccgtcgttgctgcgggtgatgcgggcgagtgcatccacgcaggtcggcgaggtgatgtcggcgctgcccaggcggcagttcgcttcgttggccaggatcgtgcgcacgtccatgtcctgcacctggtcgcgcatgtcgatgtcgaaccagtccaccgacaggtccaggccgacggtcggcgaccagacgaagccggcactccacgaggtgctggtttccgggtcgagctggcggttgccggtgcggctgcggatcaggttgcgctcgtagtcggcgcagtcggtggcgccgtcggcgcggcagctgtacaggtcttcggcggtggtctcatcgttgcccgggccggcgaatacatagtgcaggtccggcgcacggaacgcggtgccatacgaaccgcgcaccagcagcgtgtcgatcgggcgccattccaggccaccgctccaggtcgccttgccgatggtgtggccggaatagcggtactggtcgtagcggccggccacgctcaggttgaccgtttcgtgcagcggcatgcgcagctcggccgccgtagcccagcggttgcgcgaaccttggccgtccgaatccttccagctgtaatagtagtactgggtcgccagcggatcaggattgagcgagtacgcctgctggcccacttccacggtcgcggcgaaaccggcgtcaccgccgggcaggccgaacagcgcggaattggtcagagtgaatgccgccgtctccgtgcgcgacttcggcgtgtaggtggtacgcgcggcgatcgaatcatactcggcgcgggtcagcggccggtacaggcgtgacgggtcggcgttgtagatcgggaaaccgtcgtcatccacgcccagctgcgggccgaggaacaggtcattggccttggcggcgatgatctgcgcccagctgatccgcgactggtactgcgaatggctcaatgccgcttcgtagtcccagttgccggccaggttgcccttgaagccggtggtcacgctgaaggtcttctgcgtgctgcgcaccatggcattgcgcaggccacccatttcctcgggcgagaactggcgctgccagaactcgatctcgccggtcgcttcgttgttgaagtagcccgactcatcgccgttggcgtccatgcggccccacttggtgacgtcgcgcatcagcgacatcgtgtgatagcccagctgcacatcggcgaaccactgctggccattgtcgaagtcgtagctcagcgaggcgtagccattggcaccacggcgcttgctgaggatggtgccgtagccgatcgagctgtcgcttccgcagtaatagccatagcgcgggcggtaggcgcggtaggtgctgccctggttctggccggacagcgcttcgcaggtggccgcgcccgggtccaggtagtcatcgttgtagtcggtgcgcaggtaggcgcggcgggcgatgcgcgaaccctcggtggggccgtcctgggtcgagtcctggatgtcgcgctcataggcccacagcggcgtctgcgactgcagttccacgctgtacaccgcgttgaagttgccacggctgaaaccgctggcgatgctcatgtcgaacgactcgccaccgccttcagtggtggtgcccatgcgcatgtcgatcgtggtgccgtcggccttcttcttcaggatgaagttgaccacgccggcgatcgcgtccgatccatagatggccgaggcgctgccggtcagtacttcaatgcgctcgatcatccccagcggaatgttggagacatcggtgaagttgctgcggcccttgaacggcatcgggaagtcggcgatacggcggccattgaccagcaccagcgtgtggttcgggcccaggccgcgcaggtccacctgctgggcacccggcgagaagtcggcgccgctggaagactgctggctctgcgtctcaccgccgttctgggtcatcgcacgcagcacgtccggcacgctggtgaagccactggaacggatctgttcggcgttgatcaccgtgatcggggcggggccttccacctgggcgcgcggaatgcgcgaaccggtgacctgcaccgcgtccagttgttgtaccggagaggacgccggagcctgggcggccgcggaagcagccacacccatcaacgcgagctggatcgaccacgccatcgcctttctacgcatgaggaattctcggaaatgaagccggcccgcagaggaggggcctgtcccccattcagatttccggaatgggcgcgcgcatttaacgccttttttatgtccttgactactgggtccctatctggcaaagagtgaaaacgcttgcaagtcgattttgttcagggagatcaagatgcgacgcgttcaccggaccctgcgtacccctgttgcctggctggcgctgctgatgctggcctggccgtcggccgcgcaggatctgcagggcccgggcttttcctattacgaggtcggcgaccttgaggccccacgtcccgggccgcgtgcatccgcgatgatgctgatgggcggtggcgagtgggtgccggatgccttccagtggtggttgaagcaggccggcaatggccgtgtactgatcctgcgtgcctccggtggcgatgaactgcaggaccgcctgtaccgcgagatcggcggcaccaccgcggtacagacgctggtcttcgacagccgccgcggtgccgatgatccagccgtgctgcgcgtggtcgctgcggccgatgccatcttcattgccggcggcgaccagtcgcgctacatccgcttctggaagggcaccgcactcaaccgcgcgctcaacgcccatgtacgcgccggcaagccgattgccggtaccagcgctggcctggccatcctcggcggctatgcctatggcgccatggatggcggcagcatcagctcggccggtgcgctggccgatccgatgggcagcgcagtcaccatggacagtggcttcctgcagatgccctacctgcagcgcgtggtcaccgacacccatttcgacaagcgtgaccgccttggccgcctcatcgtgttcgtggcacgcgccgcgcaggacagcggcgaccctgacatcgtcggcatcggcgttgatgaggacaccgccctgtgcgtggagcccgatggccaggcccaggtctacagcgctgatggcgagggcaaggtctgggtggtcagccccggtcgtgatgccgatcgcctggtcgagggcgaaccattgcgcttccatgccgttccagtgaccgtggtcgccagtggcagccgcatgcgcctggacgatttccaggccgaggccgactaccaggccgtggccgacatcagcgacggcgaaatcgagttcacgcttcggtagcgccggccgctggccggcaactcacttccctgacctgatgcgccccttgcggccagcggccggcgctaccctgcaatccattcccttgtcctgctggagacgtacctgatgaaactgcgcctggcgctgtccgcgctgctgtccttgccattgatcgcccaggccgccccggctgcgtcgccattgctggtcatccatggcggcgccggcgtcgaacgcaaggacctgtcgccagccgaagagaaggctgcgcgcgatgcgttgcgcgccgcactgctgaaaggccatgccgaactggcggccggtcgtccggcgcttgcagcggtcactgcggcaatcaccgtgctggaggacgatccgaccttcaacgctggcaagggcgcagtgttcacccatgacggccacaacgagctggatgcggcggtgatggacggtgccacccaggcagcaggtgcggtggcaggcgtgcagcgggtgcgcaacccgatcctgctggcgcagaccgtgatgcagaagtccaggcacgtgatgatggtagggcagggtgccgaagccttcgcggtggagcagggcattgctctggttgatccctcctacttccgcacggagaagcgttggcagcagctgcagcgcgcgcttaaggaagaggccaatggccaggcccatgccgacctggagaccgcaaagcacttcggtaccgtcggtgcggtcgcgctggatgcgcaggggcagctggccgccggcacctccacgggcggcatgaccaacaagcgctatggccgggtgggtgactcgccgatcatcggcgccggcacctgggccgatgcgcgctgtgcggtgtcgggcaccggctggggcgagtactacatccgcaccgcggccgcgcacgagatctgtgcgcgcatgcgctaccaggggcagagcccggagcaggccggcaagggcgtgatcaacgagacgattccgcagatgggcggcgacggtggtgcgatcgtgcttgccgcggacggcagaatggccacgccgttcaacacccagggcatgtatcggggctggatcggcgccgacggagtcccccatgtcgcaattttcgccagcgagaccctgccggtccccggccaataaccttgcgtatcaatgggtttgcgacaacgtgtgaaaaagatggaaaaaagcgttgacagccccccgtcccatcagcagaataagcggctcaccaccacacaccgcaacgcttcggcggcaacggaatggggtggtaaggagggatacccaagcggccaacgggggcagactgtaaatctgctggcttacgccttcggtggttcgaatccacctccctccaccagtttcacgttgtgacattcccggcgcgggagtagttcaatggtagaacctcagccttccaagctgatggtgcgggttcgattcccgtctcccgctccattgaatgaactttgaatcttatcgagttcatgtcataatgcaaaactcggctcacgtagctcagtcggtagagcacttccttggtaaggaagaggtcgaaggttcgattcctttcgtgagcaccatcttaagcatcacctctcagacgaattcgagataagcagccatggccaagggtaagttcgagcgcaccaagccgcacgtcaatgtcggcaccatcggtcacgtcgaccacggcaagaccacgctgaccgccgcactgaccaagatcggtgccgagcgcttcggtggcgagttcaaggactactcctcgatcgacgccgcgccggaagaaaaggctcgtggtatcacgatctcgaccgcgcacgtcgaatacgaatccccgatccgtcactacgcccacgttgactgcccgggccacgctgactacgtcaagaacatgatcaccggtgccgcccagatggacggcgcgatcctggtgtgctcggccgctgacggcccgatgccgcagacccgtgagcacatcctgctgtcgcgccaggtcggcgtgccgtacatcgtcgtgttcctgaacaaggccgacatggtcgacgacgccgagctgctcgagctggtcgagatggaagtgcgcgaactgctgagcaagtacgagttcccgggcgacgacaccccgatcatcgccggttcggcccgcctggcgctggaaggcgaccagagcgacatcggcgtgccggccatcctgaagctggtcgacgcgctggacagctggattccggagccggagcgtgcgatcgacaagccgttcctgatgccggtggaagacgtgttctcgatctcgggccgcggcaccgtggtgaccggtcgtatcgagcgcggcgtgatcaaggttggcgacgaaatcgaaatcgtcggcatccgtccggtgcagaagaccaccgtgaccggcgttgaaatgttccgcaagctgctggaccagggtcaggcaggcgacaacgctggcctgctgctgcgcggcaccaagcgtgacgacgtcgagcgtggccaggtgctggccaagccgggcacgatcaagccgcacaccaagttcgaaggcgaagtgtacgtcctgtcgaaggacgaaggcggccgccacaccccgttcttcaatggctaccgtccgcagttctacttccgcaccaccgacatcaccggcgcagctgcgctgccggaaggcgtcgaaatggtgatgccgggtgacaacgtcaagatggtcgtcaccctgatcaacccggtggcaatggacgaaggcctgcgcttcgccatccgcgaaggcggccgtaccgtcggcgccggcgtggtctcgaagatcatcgagtaagcctgcagtaccggtggttgcatagcgccgccggttacgcgaatggcgggccgggaacctcggtccgccttcgccgtctaagggaaggcaagttttcaacgtacgccagtagctcaattggcagagcagcggtctccaaaaccgcaggttgggggttcgagtccctcctggcgtgccatctgcccaccttacccagcggcctgcgccgctaaagcagacacagccggatgaatagcaagatcgaacactccaaggacaactccgccaatggtggagatatcgtcaagtatgtcgccgcatcgttgctggtgctggccggtctgttcgtctggttctggttctccgccgactccggtcgcgccgcccagctgggtgcgtgggcgggtcaggtgcgtgcgttggcggtcgtggtcggtctggttggcggtatcggcgtgttcatgctgaccggcaaggggcgcgacacccgcgaattcctctccgagtcgcgcttcgaactgcgcaaggtggtctggccgacgcgccaggaagccatccgcatgacctgggtcgtgatcgtcgtggtgctcatcctcagcctgctgctgggtggcttcgacttcctgatccagaaactgactcagtggttcctgagccgctaaggagaattgcatgaagcgttggtacgtcgttcacgcctattcgggcttcgagaagtcggtggcgcaggccctgcgcgatcgcatcgtccgtgatggcatggaagagcgcttcggcgacgtcctggttccaaccgaagaagtggtcgagatgcgcgctggccagaagcgccgctccgagcgcaagttcttcccgggctatgtgctggtccagatcgagacccacgaagaagccggcattccgcgcatcgacaacgaaagctggcacctggtcaaggaaaccccgcgcgtgatgggcttcatcggcggtaccgctgatcgtccgctgccgatcgccgattccgaggccgaggccatcctgaaccgcgttcaggaaggtgtcgagaagccgcgtcccaaggtgctgttcgagccgggccagatggtccgcgtcaccgacggtccgttcaatgatttcaatggcgtcgtcgaagaagtcaactacgagaagagccgtctgcgcgtctcggtgctgatcttcggtcgtgcgaccccagtcgagctcgagttcggccaggtcgaaaaggccgtctgacctgtctgtagcgtcgagcatggctcggcgtcggaccagaaaccgggcctggcccggtttcgttcgtttacctgccgcttcaggcatgtgaagaaaaaacctgttatagtgcgcggctccctgctgggaaagccagcaggatgaggccgccgcaaggtggccttcagcatgatttcaaaacgcgatgccgggacgcgtgattcccggtccgatggggagcctgttgtcgaaaggcgctagcacccggagagcactcacatggcaaagaaagttgtcggttacatcaagctgcaggtgaaggccggtcaggccaacccctcgccgccggtcggtcctgcgctgggtcagcgtggtctgaacatcatggaattctgcaaggcgttcaacgctgccacgcagaagctcgagccgggtctgccggttccggtgatcatcacggcctactcggaccgtacgttcaccttcatcaccaagagcaccccggccaccaccctgctgaagaaggccgctggcatctcgtcgggctccaagcgcccgaacaccgagaaggtcggcaaggtcacccgtaagcagctggaagagatcgccaaggcgaaggaaccggatctgactgccgccgacctggacgccgccgtgcgtaccatcgctggctctgcccgttccatgggcctcgtggtggagggttaataagatggcacagaccaagcgtgagaaggccatcaaggccgccgtcgttccgggcaaggcgtacgccttcgaggacgcgatcaacatcctgaagaccgccaccaaggccaagttcgtcgagtcgatcgacgttgccgtgcgcctgggcgtcgatgcgaagaagtccgaccagcaggtccgtggctccaccgtgctgccggccggtaccggcaagtcggtccgcgtcgccgtgttcgctccggccggtgccaaggctgatgaagccctggccgctggcgccgaagccgtcggtatggacgatctggccgagaagatgcaggccggtgatctgaactatgacgtcgtcatcgcgaccccggacgccatgcgtgtcgtcggtaagctgggcaccgtgctgggcccgcgcggcctgatgccgaacccgaaggtcggcactgtttccccgaacccgggtgaagccgtgaagaacgccaagtcgggtcaggtccgttaccgcaccgacaaggccggcatcatccactgcaccatcggcaaggccgacttcgccgaagacgcgctgaagtcgaacctgaccgcgctgctgctggacctgatcaaggccaagccggccacctcgaagggcacctacctgcagaaggtttcggtcagctcgacgatgggcccgggcgtcaccgtcgaccagtcgtcgctgaccctgaagtaattgtttcaagcggtcacggtaccttcggtgccgtgaccgtgacatttgaaggcatcgctggcagtgcatcgcctgcggtagccgtcaaagaccgcaggcgcggtcgtggcaataccggcgacgggcacggaagctcgatctggcaaggagtcgccgccggagcagtcatgagcgcttaatcgattccccggaatcaccctgcgtagatggtgcccttctggagtttttctggttcacgcacgtctgggtttcccaggttggcccactccaggtctagaacggcccacccccggaacatcatcccgatgttcccggcgtccaggacggatgccgcacaggaccgcacacggcaggagccgtaagcggagttcaataggaggagtgcaatggctctcaatctgtcccagaagcaagaagtagtcgccgagctggcagacgtcgccgccaaggcccactccttgatcgcagccgaatacgctggcaccacggtcgcccagatgaccgcgatgcgcaagcaggctcgtgaaaccggtgttttcttgaaggttgtcaagaacaccctggcttcgcgcgccgttgaaggcaccgagttcgcagtcgcccaggaccagatggttggtccgctgctgtacgcgttctcgctcgaggagcccggcgctgccggtcgcctgatcaaggaagccgccaagggcaacgacaagctgaaggctaaggtcgtcgccatcggtggcgaagtgttcccggcaagccacgtcgaagtgctggcctcgctgccgacccgcgaccaggccctggccatgctggcccgcgtcctgaccgagccggtcacgatgtttgcccgcgccatcaaggccgttggcgagaagcagggggtggcgatgtcgccgccgacgctgccgagccggccgccgagaccgcctgagtttcgacttaccgtggttcctgacggaacctcaacccagaaaatcatccaaaggtattaatcatgtcccttaccaacgaacagatcgtcgacgccatcgccgagaagtccctgatggaagtgatggagctggtcaaggccatcgaagagaagttcggcgtctccgccgctgctccggttgccgtggctgctgccgctggcccggccgctgctgttgaagagcagaccgagttcaccgtcaccctgaagaccgccggcgagaagaaggtcgaggtcatcaaggccgtccgcgccatcaccggcctgggcctgaaggaagcgaaggacctggccgaagccggtggcgtcctgaaggaaggcgcttcgaaggaagacgccgagaagatgaagaaggacctggaagctgctggcgcgactgtcgaagtcaagtaagcagttaccttgcatcgtcaccgattcacggcgatgcagccaaggctgggggcgtaagcctccggcctttggtcgttgttgcggtaccggtagggtcgactgttagtcgactgtttcaaaagcaggaaaaagcccaacacgggctgcagtcaaaccccggcaggccagcgcacggcgcggcagcgggggagtggtagcagacgagttggcagttggaagtagcgggagaaggcgtgctggtgccggcaataccagcgacttccaactgacaatttcaagttcccttcggatcgtgggcgcacgatccgcacaacaaggtggaagacctcatgacgtcctattcgttcaccgaaaaaaagcgtatccgcaaggatttcggcaagcagcgctcgattctcgaagtgccgttcctgctcgccatccaggtggattcctatcgtgaattcctgcaggaaaacgtcgatccggccaagcgcacggaccacggcctgcacgctgcgctgaagtcggtcttcccgatcgccagctacagcggcaatgctgccctggaatacgtcggctacaagctgggcgaaccggtcttcgacgagcgtgagtgccgccagcgcggcatgagctacggcgccccgctgcgcgtgaccgtgcgcctggtgatctacgaccgtgagtcgtcgaccaaggccatcaagtacgtgaaggagcaggaggtctatctgggcgaaatcccgctgatgaccgagaacggcaccttcatcgtcaacggcaccgagcgcgtcatcgtctcgcagctgcaccgctcgccgggcgtgttcttcgaccacgaccgtggcaagacccacagctcgggcaagctgctgtacagcgcccgcatcattccttaccgcggttcctggctggacttcgagttcgacccgaaggacgcgctgttcacccgtatcgaccgccgccgcaagctgccggtgtcgatcctgctgcgcgcgcttggttacagcaacgaggagatgctggccgagttcttcgagatcaacaccttccacatcaatccggatgaaggcgtccagctggagctggtgccggagcgcctgcgtggcgaaaccctgggcttcgacctcgccgacggcgacaaggtcatcgtggaagccggcaagcgcatcaccgcgcgccacatcaagcagctggaagcctcgggcatcgccgccctggccgtgccggacgactacatcgtcggccgcatcctgtcgcacgacgtggtcgatgcctccaccggcgagctgctggcccaggccaacgacgagatcaccgacgagcagctgcaggccttccgcaaggccggcgttgacgcggtcggcaccctgtgggtgaacgacctggatcgtggtccgtacctgtccaacaccctgcgcatcgatccgaccaagacccagctggaagccctggtcgagatctaccgcatgatgcgtccgggcgagccgccgaccaaggatgccgcgcagaacctgttccacaacctgttcttcaccttcgagcgctacgacctgtccgcggtcggccgcatgaagttcaaccgtcgcgtgggccgcaaggaaaccaccggcgaagccgtgctgtacgacagcaagtacttcggtgagcgcaacgacgaagagtccaagcgcctggtcgctgcccacggcgacagctccgacatcctggacgtgatcaaggtcctgaccgagatccgcaacggtcgcggcgtggtcgatgacatcgatcacctgggcaaccgtcgcgtgcgttcggtcggtgaaatggccgagaacgtgttccgcgtcggcctggtccgcgtcgagcgcgcggtcaaggagcgcctgtcgatggccgagtcggaaggcctgaccccgcaggaactgatcaacgccaagccggtcgccgctgccatcaaggagttcttcggctcctcgcagctgtcgcagttcatggaccagaacaacccgctgtcggaagtgactcacaagcgtcgcgtctcggccctgggtccgggcggtctgacccgcgagcgcgccggcttcgaagtgcgcgacgtgcacccgacccattacggccgcgtctgcaccatcgaaaccccggaaggcccgaacatcggcctgatcaactcgctggccgtgtacgcccgcaccaaccagtacggtttcctcgagaccccgtaccgcaaggtcgtggacggcaaggtctatgacgaagtcgagttcctgtcggcgatcgaagaaaacgagtacgtcattgcgcaggccaacgcgctgaccgacgccaagggcaccctgaccgagcagttcgtcccgtgccgcttccagggcgaatcgctgctgaagccgccggcggaagtccacttcatggacgtctcgccgatgcagaccgtgtcgatcgcggccgcgctggttccgttcctggagcacgatgacgccaaccgcgcactgatgggcgccaacatgcagcgtcaggccgtgccgaccctgcgtgcgcagaagccgctggtcggtaccggcatcgagcgcgccgtggcgcgtgactccggtgtgaccgtgaacgcccgtcgtggtggcgagatcgtgcagatcgacgcggcccgcatcgtggtcaaggtcaacgaggaagagatcgttggcgccaccgacgcaggcgtggacatctacaacctggtcaagtacacccgttcgaaccagaacacctgcatcaaccagcgcccgctggtccaggtcggtgacgtcatcgcccgcggcgacgtgctggccgacggtccgtccaccgacatcggcgaactggccctgggccagaacatgctgatcgcgttcatgccgtggaacggctacaacttcgaagactccatcctgctctccgagcgcgtggtggaagaggatcgttacaccacgatccacatcgaagagctgacctgcgtcgcgcgtgacaccaagctggggccggaggaaatctccgccgacatcccgaacgtctccgagcaggcgctgaaccgcctggacgagagcggcgtggtgtacatcggcgcggaagtccgtgccggcgacatcctggtcggcaaggtcaccccgaagggcgaaagccagctgaccccggaagagaagctgctgcgcgcgatcttcggcgagaaggcttcggacgtgaaggacagctcgctgcgcgttccgccgggcatggacggcaccgtcatcgacgtgcaggtcttcacccgcgacggcatcgagaaggacaagcgcgcccgccagatcgaagagtctgaaatcaagcgcgtcaagaaggacttcgacgaccagttccgcatcctggaagccgccatctacatgcgtctgcgttcgcagatcgtgggcaaggtggtcaacggtggcgctggcctgaagaagggtgacgtgatcaccgacgccttcctggacggcctgaagaaggctgactggttcgccctgcgcatgaaggacgaggacgcttcggaagccatcgagcgcgcgcagaagcagatccaggcgcacgagaaggagttcgagcgtcgcttcgccgacaagcgcggcaagatcaccgccggtgacgacctcgctccgggcgttctgaagatggtcaaggtgttcctggccgtgaagcgccgcatccagccgggcgacaagatggctggccgccacggcaacaagggtgtggtctccaacgtggtgccggtcgaggacatgccgtacatggcctcgggcgaaaccgtcgacatcgtgctgaacccgctgggcgtgccgtcgcgcatgaacatcggccagatcctggaagtgcacctgggctgggccgccaagggtctgggtcgcaagatccaggcgatgatggaagcccaggcggcggtcgccgacctgcgcaagttcctggacgacatctacaaccacgacgacaccaacgtggccaaccgtgtcgacctgtcgcagttcagcgacgaggaactgctgcgcctggcccgcaacctgaccgacggcgtgccgatggctaccccggtgttcgacggcgccaccgaagcggaaatcaagcgcatgctggaactggccgacctgccgagcagcggccagacccagctgtacgacggccgcaccggtgaagccttcgatcgccacaccaccgttggctacatgcactacctgaagctgaaccacctggtcgacgacaagatgcacgcccgttcgaccggtccgtactcgctcgtcacccagcagccgctgggcggcaaggcgcagttcggcggccagcgcttcggtgaaatggaagtctgggcgctggaagcctacggcgcggcctacaccctgcaggaaatgctgacggtgaagtccgatgacgtgcagggccgcaaccagatgtacaagaacattgtcgacggtgagcacgagatggtcgcgggcatgccggaatccttcaacgtgctcgtgaaggaaatccgctcgctggccatcaacatggaactggaagacaactgatccatgccggcgcggcggcctccgccgccgcgccgctggcagtcaactgaaagcccatcgacacagcattcctccttctggagaacaccatgaaagacctgctcaacctcttcaaccagcagcgccagacgctggacttcgacgcgatcaagatcgcgctggcctcgccggacctgatccgttcgtggtccttcggcgaagtgaagaagccggaaaccatcaactaccgtaccttcaagccggaacgcgacggcctgttctgcgccgccatcttcggcccggtgaaggactacgagtgcctgtgcggcaagtacaagcgcatgaagcaccgcggcgtggtctgcgaaaagtgcggcaccgaagtgaccctggccaaggtgcgccgtgagcgcatgggccacatcgacctggcgtcgccggtcgcgcacatctggttcctgaagtcgctgccgtcgcgcatcggcctgatgctggacatgaccctgcgcgatatcgagcgcgtgctgtacttcgaagcgtacgtggtgaccgagccgggcctgaccgccctggagcgccgccagctgctgaccgaagaacagtacctgcaggcccgccaggagcacggtgacgacttcgacgccgccatgggcgccgaggccgtgtacgaactgctacgcacgatcgacctgcagtcggaaatgacccgcctgcgcgaggaaatcgccgctaccggctcggaaaccaagctcaagcgcctcaccaagcgcatcaagctgatcgaggccttcctggaatcgggcaaccgtccggaatggatggtcatgaccgtgctgccggtgctgccgccggacctgcgcccgctggtcccgctggatggcggccgcttcgcgacctccgacctgaacgacctgtaccgccgcgtcatcaaccgcaacaaccgcctgcgccgcctgctcgagctgagcgcgccggacatcatcgtgcgcaatgaaaagcgcatgctgcaggaatcggtcgatgcgctgctggacaacggccgtcgcggccgtgccatcaccggcaccaacaagcgcccgctgaagtcgctggccgacatgatcaagggcaagcagggtcgcttccgccagaacctgctcggcaagcgcgtcgactactccggccgttcggtcatcgtggtcggtccgtacctgcgcctgcaccagtgcggcctgccgaagaagatggcgctggagctgttcaagccgttcgtcttcgccaagctgcagcgtcgtggcctggccaccaccatcaaggccgccaagaagctggtcgagcgcgaagaagccgaagtctgggacatcctggaagaggtcatccgcgagcatccggtgatgctgaaccgtgcgccgaccctgcaccgtctgggcatccaggcgttcgagccggtgctgatcgaaggcaaggccatccagctgcacccgctggtctgcaccgcgttcaacgccgacttcgacggtgaccagatggccgtccacgtgccgctctcgctggaagcccagctggaagcgcgtgcgctgatgatgtcgaccaacaacatcctgtcgccggccaacggcgagccgatcatcgtgccgtcgcaggacgtcgtgctgggtctgtactacatgacccgctcgctggaaaacaagaagggcgagggcatggccttcgccaacatcgccgaagtgaagcgtgcctacgacaaccgcgtggtggaactgcacgccaaggtcaaggtccgcatcaccgaggtggtgaccgacgaagacggcaacaagcagaacaagacctcgatcgtggacaccacgatcggtcgcgccctgctggctgaaatcctgccggaaggcctgccgttcgcgctggccaacaccgagctgaccaagaagaacatcagccgcctgatcaactccagctaccgccagctgggcctgaaggacacggtcgtgttcgccgacaagctgatgtacaccggcttcgcctacgcgacccgcgccggcgtttcgatcggcatcgacgacatgctgatcccggacgagaagaagggcatcctcaccgaggccgaagccgaagtgctggaaatccaggagcagtaccagtcgggtctggtcaccgccggcgagcgctacaacaaggtggtcgacatctggtcgcgcaccaacgagcgcatcgccaaggcgatgatggacaccatcggtaccgagaaggtggtcaatgccaagggcgagaccatcgaccagaagtcgatgaactcgctgtacatcatggccgactccggtgcgcgtggttcgcaggcgcagatccgtcagctggccggcatgcgcggcctgatggcccgcccggacggctcgatcatcgagacgcccatcaaggcgaacttccgcgaaggcctgaacgtgcaggagtacttcaactccacccacggtgcccgtaagggtctggccgataccgcgctgaagaccgcgaactcgggttacctgacccgtcgtctggtcgacgtcgcgcaggacgtggtgatcaccgaggtggattgcggtaccaccgaaggcctgatcatgaccccgatcgtggaaggcggcgacgtggtcgagccgctgaaggaccgcgtgctgggccgcgtggttgccgaggacgtgttcctgccgggcaacgacgaggatccgatcgtcacccgcaacaccctgctcgacgaagcctgggtcgccaagctggaagatgccggcgtgcagaccatcaaggtccgctcgaccatctcctgcgaatcggcgttcggtgtctgctcgcgctgctacggccgcgacctggcccgtggccacctggtcaacatcggtgaagcagtcggcgtcatcgccgcgcagtccatcggtgagccgggtacccagctgaccatgcgtacgttccacatcggtggtgcggcgtcgcgagctgcagcggtcgacaacatcaccgtcaagaccaccggctcggtcaagttcagcaacctcaagtcggtcgagcatgccaacggctcgctggtcgcagtgtcgcgctcgggcgaaatctcggtgctcgatgcccacggccgtgagcgtgagcgttacaagctgccgtacggtgcgaccatcacgtccaaggacggtgatgcgatcaaggctggccagaccgtggccaactgggatccgcataaccacccgatcgtgtcggaagtggccggcttcatccgcttcatcgacttcgttgatggcatcaccgtcatcgagaagaccgacgagctgaccggcctggcttcgcgcgaaatcaccgatccgaagcgtcgtggtacccaggccaaggacctgcgcccgatcgtgcgcatcgtcgacgccaagggcaatgacctgtcgattccgggcaccgacctgccggcgcagtacctgctgccgccgcgttcgatcgtcaacctgcaggacggcgccccggtgggcgtgggcgacgtcgtcgccaagatcccgcaggaagcgtcgaagacccgcgacatcaccggtggtctgccgcgcgtggccgacctgttcgaagcgcgcaagccgaaggatccggcggtgctggccgagcgttcgggcatcatcagcttcggcaaggacaccaagggcaagcagcgcctgatcatcaaggacaccgatggttcggagcacgaagagctgatcccgaagtaccgccaggtcatcgtgttcgaaggcgagcatgtcaccaagggtgaaaccatcgtggacggcgagccgagcccgcaggacatcctgcgcctgctgggcgtcgagccgctggcggcctacctggtgaaggaaatccaggacgtgtaccgcctgcagggcgtgaagatcaacgacaagcacatcgaggtgatcacccgccagatgctgcgcaaggtcgagatcaccgatcagggcagcagcaagttcctgaacggcgaacaggtggagcgtcagcgcgttatcgaggaaaatgcgcgcctgtcggcccgcaacgagctgccggcgcacttcgatccggtcctgctgggtatcaccaaggcgtcgctggcgaccgaatcgttcatctcggccgcttcgttccaggaaaccacccgcgtgctgaccgaagcggccgtccgcggcacctcggacaacctgcgtggcctgaaggaaaacgtcatcgtgggtcgcctgattccggccggtaccggcctggcgtaccacagcaaccgccgtcgcggcgcttccggtctcaccgagtcggaaatgcagaccctggccggtaccccggccgcggtcgaggcgccggtggttgaagccgaagctgaacaggcgtcgggcgaagaatgaggtagccggtccggccgcaaggccggaccaccccatcggtccatcgatgggattgggaaagggcaggggagatcgtccgcgatcgaccctgtcaacctgaacggggtacatggaggccccccagtaacgtcccgggatcagggacgggcttgacaggaggcgtttgactgctttcctggcaggttgctacaatcgtctgtctcagcaggccagaatttcggcctgctttaacatttccgcatctctggtcggattttccggccaccaatcagaagaacctactgatggcgacgatcaaccagctggtccgcaagccgcggcaagcgaccacctacaagagtgcctcgccggcgctcgacaagtgcccgcagcgccgtggcgtctgcacccgtgtctacaccaccactccgaagaagccgaactcggctctgcgcaaggttgccaaggtccgcctgaccaaccaggaagaagtgatttcctacatcggtggtgaaggccacaacctgcaggagcactccgtggtcctgatccgcggcggtcgcgtcaaggacctgccgggtgtgcgttaccacaccgttcgtggctcgctcgacgccgccggcgttgccaagcgtcgccaggcccgttccaagtacggcgccaagcgtccgaaggcataaggagagagcactatgtcgcgtaagggtaatactccgcagcgttccgtcctgcccgatccgaagcacggaagcgaaaccatcgcccgcttcatcaacatggtcatgcagagcggcaagaagtccgtcgccgaaaagatcgtgtacggcgccatggacgtgatcaccgagaagaacagcagcgccaacgccattgaactggtgcagaaggctctggacaacgtcgctccggcggtcgaagtcaagtcgcgtcgcgtcggtggtgccacctaccaggtgccggtcgaagtgcgttcgtcgcgcaagatggccctggccatgcgctggctgatcgactccgcgcgcaagcgtggtgagaacaccatgccgaagaagctggctgctgaactgatcgacgcctcggaaaaccgtggcggcgccatcaagaagcgcgaagaaacccaccgcatggccgaagccaacaaggcattcgcccactaccgctggtgagtttgacggccttgtaaaacaggcagggcagcaccacttcggtgcgtgctgcctcgcggtcccagaaggactgcgccaatccgaaggccgccgaaaggcggcgttcggccatccgaaatccaagaaatctgagaggctcccgtggcccgttccactcccatcgagcgttaccgtaacttcggcatcatggctcacatcgatgccggcaagaccaccacgtccgagcgcatcctgttctacaccggcaagagccacaagatcggtgaagtgcacgacggcgccgccaccatggactggatggagcaggagcaggagcgtggcatcacgatccagtccgctgccaccaccgcgttctggaagggcatggacaagtccctgccggagcaccgcttcaacatcatcgacacccccgggcacgtcgacttcaccatcgaagtggagcgctcgctgcgcgtgctcgacggtgccgtcttcgtcctgtgtgccgtcggtggcgtgcagccgcagtcggaaaccgtgtggcgccaggccaacaagtaccacgtgccgcgcatcgcgttcgtcaacaagatggaccgcaccggtgccaacttccagaaggtcgtcggccagctgaaggccaagctgggcgcggtcgccgtgccgatgcagctgccgatcggcgctgaagacaacttcaagggcgttgtcgacctgctgaagatgaaggccatccattgggatgaggcttcgcagggcatgaagttcgaatacagcgacatcccggccgatctgcaggcggctgccgaagaggctcgccagttcatggtcgagaccgctgccgaagccagcgaagagctgatggaaaagtacctgggcggcgaagagctggccgaggctgaaatcatcaacgcgctgcgtacccgcaccctggccaccgagatcgtgccgatgtactgcggctcggccttcaagaacaagggcgtgcaggccatgctggacggcgtgatccagctgctgccgtcgccggtcgacgtgccggacgtgaagggcgtggacgttgacgacgacaccgtcgagatgacccgcaagtcggacgacaaggctccgttctcgtcgctggccttcaagatcatcaccgacccgttcgtcggcgcgctgaccttcttccgcgtctactcgggcaccctgaacggtggcgacaccgtgctgaactcggtgaagggcaagaaggagcgcatcggtcgcatcctgcagatgcactcgaacaaccgcgaggaaatcaaggaagttctggctggtgacatcgctgctgccgtgggcctgaaggacaccaccaccggtgacaccctgtgcgccgtggacgcgccgatcatcctggagcgcatgacgttcccggagccggtgatctcgatggccgtcgagccgaagaccaagtcggaccaggaaaagatgggtctggccctgggccgtctggcgcaggaagatccgtcgttccgcgtcaagaccgacgaagaatccggccagaccatcatctcgggcatgggcgagctgcacctggacatcatcgtcgatcgcctgaagcgcgagttcaacgttgaagccaacgtcggcgcgccgcaggtggcctaccgcgaaaccatcaccctggctgacgtcaagtcggactacaagcacgccaagcagtccggtggtaagggtcagtacggtcacgtcgtgatcgagctgtcgccgatcaccgctgaagaccgtgccgatccgaagctggctccggccatcaaggacgacttcctgttcatcaacgacatcaccggcggcgtgatcccgaaggaattcattccgtcggttgaaaagggcctgcgcgaaaccatcaccagcggtccgctggctggcttcccggtcgtggacgtcaaggtgaagctggtgttcggttcgtaccacgacgtcgactcctcggaaatggcgttcaagctggcttcgtcgatggccttcaagcagggcttcgccaaggccaagccggtgctgctggagccgatcatgaaggtcgagatcgtgaccccggaggattaccagggtgacgtgatgggcgacgtcagccgtcgtcgcggcgtgctgcagggttccgacaccaccggtgacggttcggccagcatcatcaacgcgatgatcccgctgggtgaaatgttcggctacgccactgcgctgcgttcgcagacccagggccgcgccaccttcaccatggaattcgatcactacgagccggctccgaccaacatcgccgaagccgtcatgaagaagggctgagcctcgctcagcctctcttgaaaccacttacgaacaatcaaggtatagaacaatggcaaagggtaagttcgagcgcaccaagccgcacgtcaacgtcggcaccatcggtcacgtcgatcacggcaagaccacgctgaccgccgcactgaccaagatcggtgccgagcgcttcggtggcgagttcaaggattactcctcgatcgacgccgcgccggaagaaaaggctcgtggtatcacgatctcgaccgcgcacgtcgaatacgaatccccgatccgtcactacgcccacgttgactgcccgggccacgctgactacgtcaagaacatgatcaccggtgccgcccagatggacggcgcgatcctggtgtgctcggccgctgacggcccgatgccgcagacccgtgagcacatcctgctgtcgcgccaggtcggcgtgccgtacatcgtcgtgttcctgaacaaggccgacatggtcgacgacgccgagctgctcgagctggtcgagatggaagtgcgcgaactgctgagcaagtacgagttcccgggcgacgacaccccgatcatcgccggttcggcccgcctggcgctggaaggcgaccagagcgacatcggcgtgccggccatcctgaagctggtcgacgcgctggacagctggattccggagccggagcgtgcgatcgacaagccgttcctgatgccggtggaagacgtgttctcgatctcgggccgcggcaccgtggtgaccggtcgtatcgagcgtggcgtgatcaaggttggcgacgaaatcgaaatcgtcggcatccgtccggtgcagaagaccaccgtgaccggcgttgaaatgttccgcaagctgctggaccagggtcaggcaggcgacaacgctggcctgctgctgcgcggcaccaagcgtgacgacgtcgagcgtggccaggtgctggccaagccgggcacgatcaagccgcacaccaagttcgaaggcgaagtgtacgtcctgtcgaaggacgaaggcggccgccacaccccgttcttcaacggctaccgtccgcagttctacttccgcaccaccgacatcaccggcgcagctgcgctgccggaaggcgtcgaaatggtgatgccgggtgacaacgtcaagatggtcgtcaccctgatcaacccggtggcaatggacgaaggcctgcgcttcgccatccgcgaaggcggccgtaccgtcggcgccggcgtggtctcgaagatcatcgagtaatctggtagtatttgcgccccgatgttgcctgggtagggcatcggggcgtatcaaatgggaaagcaggcacaggatgtgccttgtgttccccggaccaggaagggtcaatgccattcaggcggcgtcaacaggcgactgttgacagctgccttgcgtgccattatgcttctacgtctgggcaggccgggaaactggtctgcctacgtttttgaggtccatggagtgaccttgtcggcctgcaggactgcgggccgtccgtattcaggaatttcatggggcaaagcaacccagaggctttgtctgtcgctcttttaacgaaggaacctaccgccatggcggaccaaaagatccggatccggctgaaagcgttcgatcatcgtctgatcgaccgttcggccagcgagatcgttgaaacggcaaagcggaccggcgcgcaagtgcgtggcccgatcccgctgccgaccaagatcgagcgttacaccgttctcgtctccccgcacgtcgacaaggacgcgcgtgaccagtacgagacccgcacgcacaagcgcgtgctcgatatcgttgacccgaatgacaagaccgtggacgcgctgatgaagctcgaactggctgccggcgtcgacgttcagatcaagctgacctgaggactacgaccatgacgaagaagtattcgttgggcttcgtgggccgcaaggccggcatgagccgcgtgttcaccgaagatggccgttccatcccggtgaccctgatcgaagcaaccccgaaccgcatcgcgcagatcaagaccgtcgaaaccgacggctacagcgccgtgcaggtgaccgtcggcgcgcgtcgcgctgccctggtcaacaagccggaagccggccacttcgccaaggcgaaggtggaagcgggtcgtggcctgtgggaattccgcgttgaagacgcgcagctcggcgatttcgccgttggcggcgaagtcaaggcggacatcttcgaagtcggccagatcgtcgacgtccagggtgtcaccaagggtaagggcttccagggcaccatcaagcgccacaacttccgtatgggcgatgcaacccacggtaactcgctgtcgcatcgcgcgccgggttcgctgggtcagcgccagaccccgggtcgcgttttcccgggcaagaagatgtcgggccacatgggcgcggtgcagcagagcacccagaacctggaagtggtcaaggtcgacgtcgagcgcggtctgatcgccgttcgcggcgccgttccgggcgcggcgggtggcgatgtgatcgtccgtccggcgagcaaggcataaggagagatgacgatggaactcgttatcacgggtagcaacaacaaggtctcggtctccgacgccgtgttcggtcgcgatttcagcgaagatctggtccaccaggtcgtcgttgcctaccgcaacgccggtcgcgccggcaccaaggcacagaagactcgctccgaagtggctggtaccaccaagaagtcgaagaagcagaagggcggcggcgcgcgtcatggcgcactgacggctccgatcttcgtcggcggcggtgtcaccttcgcggccaagccgcgcagcttcgagcagaaggtcaatcgtaagcagtaccgtgccgccatgtgcgcgatcctgtccgagctgaaccgtcagggccgtctgaccatcgtggagtccttcgatgtcgaagtgaccaacacgaagggtctgatcgccaagctggccggcctggaagtgggcaagcgcccgctgatcgtcaccgaagaagcgtccgagcacctgtacctgtccgcccgcaatctgccgtacgtgcaggtgcgtgacgtccagggtctggatccggtctcgctggtgggtgccgacacggtcgtcatcaccgctgacgcggtcaagaaggtcgaggagtggctggcatgaacggcaacgaaaaaatcttcagcgtgctgcgtgccccgcgtgtctccgaaaagaccgcgcgcctgcaggaactctccaaccagtatgtcttcgaagtttcgaacgaagccaccaaggccgatgtaaaggccgcggttgagcagctgttcgacgtcaaggtcgaagccgtcaacgtggttaacgtcaagggcaagaacaagtccttccgtaaccgtgctggccgccgcggcgattggcgcaaggcgtacgttcgcctggccgacggccagtcgatcgatgtaacggccaaggcctgaggtacatcccatgccattgatgaaattcaagcccacttcccccggccgccgttcggccgtgcgcgtggttacgcccgacctgcacaagggtgctccgcacgccgcactggtcgagtcgcagagccgctcgggtggccgcaaccaccacggccgcatcaccgtgcgtcacgtcggtggtggtgccaagcagcactaccgcatcatcgacttcaagcgcaacaagctgggcatcccggcgcgcgtggaacgcatcgaatacgatccgaaccgcaccgcccacatcgccctgctgtgctacgtcgatggtgagcgtcgctacatcatcgccccgaagggcctgaaggccggtgatcaggtgatcgctggttcggacgccccgatcaaggccggcaacaccctgccgctgcgcaacatcccggtcggcaccaccatccactgcatcgagctgaagccgggcaagggcgctcagatcgctcgcgccgctggtgcggccgtgcagctggtggctcgcgaaggcatctacgccaccctgcgcctgcgctcgggtgaaatgcgcaaggttccggtcgagtgctgcgccaccatcggcgaagtcggcaacgacgagcacagcctggaaaagctgggcaaggccggtgccaagcgttggcgcggcgtccgcccgaccgttcgtggtgctgccatgaacccggttgaccacccgcacggtggtggtgaggccaaggccggccagggtaacccgcatccggtcaccccgtggggtgttccgaccaagggttacaagacgcgccataacaagcgcactcagcagttcatcgtccgcgatcgtaggggctaatcgaccatggcacgttcactcaagaagggcccgttcgtcgatcaccacctcgtcaagaaggtggaggccgctgcgggcagcaagaagccgatcaagacctggtcgcgccgttcgatgatcctgcctgacatggtaggcatcaccattgccgtgcataacggcaagaaccacatcccggttctcgtcaacgagaacatggtcggccacaagctcggcgaatttgccatcacccggaccttcaagggtcacggtggtgacaagaagtcgggcaagtaaggagagatgacaatggaagcgaaagccatcctgcgcactgcgcgcatctccccgcagaaggctcgtctggtcgctgaccaggtgcgcggtctgccggccgaacgtgcggtcaacctgctgaagttctcggacaagaaggctgcccacctgatcaagaaggtggtggagtcggcaattgccaacgccgagaacaaccagggcgccgacgtcgacgagctgaaggttcagaccatcatggttgatgaaggtccgaccctgaagcgtttcatggcgcgggcgaaaggccgcggtacccgcatcctcaagcgcaccagccacatcactgtggttgtgggcgccgccaagtaagcggataaggaaaagaccatgggtcataaagttcatccgattggtatccgcctcggcatttccaaggactggaactccaagtggtacgccaacaaggccgagttcgccggttacctggcagccgacctgaaagtgcgcgaaatgctgcgcaagaagctggcccaggccggcatcagcaagatcctgatcgagcgtccggccaagaccgctcgcgtgacgatccacaccgcccgtccgggcgtggtgatcggcaagcgcggtgaggacatcgagaagctgcgcaaggaagtgagcgagatgatgggcgtcccggcgcacatcaacgtcaccgaagtgcgcaagccggaactggacgcgcagctcgttgccgagtcgatcgcccagcagctggagcgtcgcatcatgttccgccgtgcaatgaagcgctcggtcggcaacgcgatgcgcctgggtgccctgggcatcaaggtcaacgttggtggccgcctcaacggtgctgaaatcgcccgttcggagtggtaccgcgaaggccgcgtgccgctgcacaccctgcgtgccgacatcgactatggcttcgctgaagccaagacgacctacggcatcatcggcattaaggtctggatctacaagggcgaggtcttcgatttctcccaggttggccaggaaaagcaggacgacaccccgtcgcgcaacgatcgtcacgatcgcggcgaccgtggtgaccgtcagcgcccggcccgtgaagcgaggtaacgacaatgttgcaacccaagcgaaccaagtaccgcaaggtacacaagggccgtaacgatggcctgagctggagcgccaacgctgtcagcttcggcgaatacggcctgaaggcaaccgcacacggtcagctgaccgcgcgtcagatcgaagcggcccgccgctcgatcagccgctacgtcaagcgcggcggcaagatgtggatccgcgtgttccccgacaagcccatcaccaagaagcccatcgaagttcgaatgggttcgggtaagggtaacgtggaatactgggtggcccagatccagcccggccgcatgatctatgaaatcgagggtgtttccgaggaagtggctcgcgaggcgttccgcctggccgccgccaagctctcggtcaccaccactttcgtgacccgtacggtgcgctgatggatatcaaaactctccgtgaaaagtcggctgacgaactcaaggcccacctgatcgacctgcgtaaggaacagttctctgtccgtatgcagcaggtcaccggccagctgccgaagacccacgacattcgccgggtccgtcgcgagattgctcgcgtcaagaccctgctcggcagcacgaagtaaggatggccgctatgagcgacaatactgaaaagaagacgctgcgcacggtcgaaggccgtgtcgtcagcaacaagatggacaagacggttaccgtcctggttgagcgtcaggtcaagcacgcgctgtacggcaagtacatcaagcgctcgaccaagctgcacgcccacgatgccgacaacgcctgcaaggaaggcgatgtcgtccgcgtgaccgagattgctccgatgtccaagaccaagaactggcgcgtggtggaagtcatcacgcgtgcggctgaataaggagtctgaatcatgatccagatgcagagctaccttgacgtcgcggacaattcgggtgccaagcaggtgatgtgcttcaaggtgctgggtggttccaagcgccgttacgccggcatcggcgacatcatcaaggtcaccgtgaaggatgcgattccgcgcggcaaggtcaagaagggtgaagtgtatgacgccgtcgtggtgcgtacccgcaagggtgtgcgtcgcgccgacggttcgctgatccgcttcgacggcaacgctgccgtcctgctgaacaacaagcaggagccgatcggtacccgtatcttcgggccggtgacccgtgaacttcgttcggagaagttcatgaagatcgtctcgctcgctcccgaagtgctgtgagcgacaggagataatcatggctaaccgtatcaagaagggcgaccaggttgtcgtcaacgctggcaaggacaagggcaagcagggcgaagtcgtccgcgtcgacggcgaccgtgtggtcgtcgccaacgtgaacatcgtcaagcgccacaccaagccgaacccgcaggcaggtgttgccggcggcgtggtcgagcgcgaagcttcgatccatatctccaacgtgaacgtgctgaacccggcttcgggcaagggcgaacgcgttggcttcaaggtgctggaggatggacgcaaactgcgtgtgttccgctccagcggtgaggcgctcgacgcctgaggaatgtgaagatgacttcccgtctcgaaaagatctacaaggaagaagtggtgccggcgctgatgaagcagttcggctacaccaatccgatggaagtaccgaagctcgtcaaggtcaccctgaacatgggtgtcggcgaggctgccaccaacaagaagatcctggaaaacgccgtcgcggacatgaccaagatttccggccagaagccggttgtcaccaagtcgcgtatctcggttgcgtcgttcaagatccgtgatggttggccgatcggctgcaagaccacgctgcgtcgccacaagatgtacgagttcctggaccgcctgatcaacatctcgctgccgcgcgtgcgcgacttccgtggtgtttccggtcgttccttcgacggccgcggcaacttcaacatgggtgtgaaggaacagatcatcttcccggaaatcgacttcgacgccgtcgacgcgatccgcggtatggatatcgccatcaccaccactgcgaagaccgacgcggaagcgaaggcgctgctggcagcgttcaagttcccgttccgtaactgatctgtcgaggaaaccgaaatggcaaagacctccatggtcaaccgcgacatcaagcgggaaaagctggccaagaagtacgctgagaagcgtgcggctctgaagaagatcgtgtcctccgtggacgcgacctacgaagagaagatcgacgccgcaaccaagctggccaagctgccgcgcgattcgtcgccgagccgtcagcgcaaccgttgcgagctgtcgggtcgtccgcgtggcgtgtacagcaagttcggcctcggccgcaacaagctgcgcgaagccaccatgcgtggcgacgtcccgggcctgcgcaaggccagctggtaatcccagccggccctgcgctcagcacccccttgcgggggtgctgaaccgggggagggggctgttcagcttcctttctgcgaaaaaacccgaagagcccgacgcaagtcgggctcttttggcgtatactcccgcgtcttgccctgtgcagacggggttgtaggagtgggccccggcccgctgcatcaagggacctggcccgtttccaggagacaacagattttcgcgaaagcggatatcggtgcactcaaaggtactcatatgagcatgactgatcccatcgccgacctgctggtccgcatcaagaatgcggccgcagttggcaagcagacggtgaaagccccgtcgtccaagatcaaggttgcgatcgcccaggtcctgaaggacgagggttacatcaccgacctgcgcgtgacccagctggaaaacaacaagtccgagctggaaatcgtgctgaagtatttcgaaggcaagccggtcatcgcgaccctgaagcgcttctcgcgttcgggcctgcgccagtaccgcggcaagagcgagctgccgaaggtcatgaacggcctgggtatctccatcatttccacctccaagggcatcatgactgatgcgcaggcgcgccagctgggcgtcggcggcgaagtcctgtgcttcgtggcctaaggcgaaaggagtagaactatgtcccgcgtagccaagaagccgatcaccctgggtaaggttgaactgaacgtccagtcggacagcgtcaccgccaagggcccgaagggcaccctgtcgctggccaagccggccggcattgccatcaacgtcgacaatggcgttgccaccctgagcaccgagaacgccgagctggtcgcactgaccggcaccgtgcgtgcgatcctgtccaacatggtcaagggcgtgtccgaaggcttcgagcgcaagctggagctggttggcgtgggttaccgcgctgccatgcagggcaaggacctgagcctgtcgctgggcttctcgcacccggtcgtgttcgtggcgccggaaggcatcaccatcaccaccccgacccagaccgagatcctggtccagggcgctgacaagcaggtcgtcggtgaagtcgccgccaagatccgtgcgttccgcaagccggagccgtacaagggcaagggcgtgaagtactccgacgaagtcatcatccgtaaggaagccaagaaggcgtaagtgcgagtccctcgcaagagcccgcacatccatgtgcggactcctcagggagaagcccatccttcagctttcaaggaataatcaaaatgaacaagaacatcgcccgcctgcgtcgcgccaagtcgacccgcgcccacatccgtgagctcggcgtcgcccgcctgtcggtgctgcgcaccggccagcacctgtacgcccaggtcttcaccgctgacggttcgaaggtgctggctgccgccaacaccacccagaccgacgtcaaggaaggcctgaagaacggcaagaacgccgatgccgctgccaaggttggccgcatcgtcgccgagcgcgccaaggccgccggcgtcgagaaggttgccttcgatcgttcgggctaccgctaccacggccgcatcaaggccctggcagaagcggcccgcgaagccggcctgcagttctaagggacaagggcagggggtcgatggcctcctgcctgcctgctcgccagcctgagcgaggctggacggcgccgctcttctgcagtggcccaccggaacaacgcgtcactccacaaccataagcggcctcgagccgtacatacccaaacaaccaaggaatcaacatggcagaagagcgtcagcagcggggtcgcgatcgcgaccgtaaccgcgaagagaagatcgacgacggcatgatcgaaaagctggtcgcggtcaaccgcgtcagcaagaccgtcaagggtggccgccagttcaccttcaccgccctgaccgttgtcggcgacggcgaaggcaaggtcggtttcggttatggcaaggcccgcgaagtgccggtcgccatccagaagtcgatggagcaggcccgcaagaacctggtcagcgttgacctgaacaacggcaccctgtggcacaccatcaaggatggtcacggcgcagcccgcgtgttcatgcagccggcttcggaaggtaccggcgtgatcgccggcggtgccatgcgcgccgtgctggaagccgttggcgtgaagaacgtgctggccaaggccaccggttcgcgcaacccgatcaacctggtgcgtgccaccgtgaagggcctgtctgctgcgcagtcgccggctcgcatcgcggccaagcgcggcaagaaggtggaggaactcaaccatggctaatgagtccaacaagactgtgaaggtccgcctggtgcgtggcctgcgtggtacccagtcgcgtcaccgcctgtcggtgcgtgccctgggcctgaacaagctcaacgatgtgcgtgaactgaaggacagcccgcaggtacgcggcctgatcaacaaggttcagtacctcgtccaggttgaggagtaatcgaccatgactctgcgtctcaatgaactgagcccggcaccgggcgcccgcaccgagcgcacccgcgtcggccgcggtatcggctcgggcctgggcaagactgccggccgcggccacaagggttcgttcgcccgtaagggtggcggcaagatcaaggctggcttcgaaggcggccagacccccatgcagcgtcgtctgccgaagatcggcttccgttcgccgatcgccaaggacaccgctgaagtgctgctgtacgcgctggacaagctgccggccggtgagatcgatttcgccgccctgcgtgctgccaagctggtcccgagcaccgcaaagaaggccaaggtcgtcgtcaagggcgaagtgaccaaggcgttcaccctgaagggtattgctgccacggcgggtgccaaggctgcaatcgaagctgccggcggcagcgtaacggagtaagaaaatcatggcgcaagctggcatcggtaacctcgcgggcggaatgggcaagttcactgaacttcgccaacgtttgctgttcgtcgtcggggctttgatcgtctatcgcatcggctgctacgtgccggtgccgggcgtcaatcccgatgccatgcttgccatgatgcaacagcagggcggcggcatcgtggacatgttcaacatgttctcgggcggcgccctgcaccgtttcagcatcttcgcgctgaacgtgatgccgtacatctcggcatcgatcgtgatgcagctggccgtgcacatcttccccgccctgaaggcgatgcagaaggaaggtgagtccggccgccgcaagatcacccagtattcgcgcatcggcgccgtgctgctggcagtggtgcagggcggctcgatcgcgctggccctgcagggccaggtctcgccgtcgggcgctccggtcgtgtatgcgccgggcatgggcttcgtgctcactgccgtggtcgcactgaccgccggcaccatgttcctgatgtgggtcggtgagcaggtcaccgagcgcggcatcggcaacggcgtgtcgctgatcatcttcgccggtatcgtggcgggcctgccgggtgcggtcatccacaccttcgatgcctaccgcgacggcaacatccagttcatccagctgctgctgatcgccatcgtcgtgctcgccttcaccttcttcgtggtgttcgtcgagcgtggccagcgccggatcacggtcaattacgcgcgccgccagggtggtcgcaacgcgtacatgaaccagacctcgttcctgccgctgaagctcaacatggccggcgtcatcccggcgatctttgcctcgagcctgctggccttcccggccaccctggccatgtggtccggccaggccgccaaccagagcagcttcggccaggtcctgcagaaggtcgccaacgccctgggcccgggcgagccgctgcacatgatcgtgttcgctgcgctgatcaccggtttcgcgttcttctataccgcgctggtgttcaactcgcaggaaaccgccgacaacctgaagaagtccggtgcgctgattccgggcatccgtccgggcaaggcgaccgccgactacatcgacggcgtgctgacccgcctgaccgcggccggctcggcgtacctggtgatcgtctgcctgctgccggaactgatgcgcacgcagctgaacgcctcgttctacttcggtggtacttcgctgctgatcgtggtggtggtggtgatggacttcatcgcccaggtgcaggcgcacctgatgtcccaccagtacgagagcctgctgaagaaggccaatctgaagggtggcaaccgcggcggttttgcccgcggctgataggcctgttatactttcgtcttcctgacgtgatggtccctccgcttcgcggactccggccacacaaacgaagggcggcccccgcagcggttccgggtgggggtgtgatgaggtggtcccgcgctggagtagcgcgggcggccccgggggaaaccccaggtccaaccccatccggcgccggagcctgggcacactccccaggccgggttcatgaaaccaatggtttcacgggcttccatgtaaaccggaaccttgttagtatcgctagttcacttttttgatccatcctgccggattggcgtgcccgaggcgcgctgtcggccatcactcagctggagaaccgcgtcatggcgcgtattgcaggcgtcaacctgccagcccagaagcatgtctgggtcgggttgcaaagcatttacggcatcggccgtacccgttcgaagaaggtctgcgaagtcgcaggcgttgcttcgaccaccaagatccgcgatctgtcggagccggaaatcgagcgcctgcgcgccgaagtcggcaagtacatcgtggaaggcgatctgcgccgtgaaatcggtatcgcgatcaagcgcctgatggacctgggctgctaccgcggcctgcgtcaccgtcgtggcctcccgctgcgtggccagcgcacccgtaccaacgcccgcacccgcaagggtccgcgcaaggcgatcaagaagtaagggactgagaaatggctaagcccgctgctaagaccaagaagaagatcaagcgcgtcgtcaccgacggcgttgcccacgtccatgcttcgttcaacaacaccatcgtcaccatcaccgaccgccagggcaatgctctgtcgtgggcgacctccggtggcgctggcttccgcggttcgcgcaagtcgaccccgttcgctgcccaggtggctgctgaaaaggccggtcgtgctgcgctggactacggcgtgaagtcgctggaagtccgcatcaagggcccgggtccgggccgtgagtcggccgtgcgttcgttgaacaacgtcggctacaagatcaccaacatcatcgacgtgacgcctatcccgcacaacgggtgccgtccgccgaagaagcgtcgcgtctaaagggagcgataagaaatggctcgttatatcggtcctacctgtaagctcgcccgccgcgaaggcgccgacctgtccctgaagagcccggcgcgtgcgctggactcgaagtgcaagctggagcagaagcccggccagcacggcgccactgcccgcaagggcaagctgtccgactacgccacccagctgcgtgaaaagcagaaggtcaagcgtatctacggcctgctggagcgtcagttccgcaactactacaagaaggcctcgaccaagaagggcaacaccggcgagaacctgctgcagctgttggaaacccgcctggacaacgtcgtctaccgcatgggcttcgccgtgacccgtccggctgcccgtcagctggtgtcgcaccgcggcgtcaccgtgaatggcaagtcggtcaacctggcttcgtaccaggtcaaggctggcgacgccatcgccctgtctgaaaaggctgccaagcagctgcgcgtccaggaagccctgaccgtcgccgcccagcatgacctgagcccgtcgtgggttgaagtggattccggcaagttcaccggcatcttcaaggctgttccggatcgttcggatctgcctgcggacatcaacgaagcgctgatcgtcgagctgtattcgaagtaattcacattggagagcccccggcgacggccgggggttcactaggagaacccgcaacatgacggttaccgccaaccaggttctgcgtcctcgcggtccgcagatcgaacgccttaccgacacccgtgcaaaggtcgttatcgaacctttggagcggggttacgggcatacgctgggtaatgccctgcgtcgcgtgctgctgtcgtccatcccgggcttcgccatcacggaagtcgaaatcgacggcgtgttgcatgagtacaccacggtcgaaggtctgcaggaggacgtgctcgaagtcctgctgaacctgaaggacgtggccatccgtatgcactccggcgacagcgccaccctgtccctgtccaagcagggcccgggcgttgtcaccgctgccgacatcaaggtcgaccacaatgtggagatcctgaacggcgaccatgtgatctgccacctgaccaaggatacggcgatcaacatgcgtctgaagatcgaacgtggtttcggctaccagccggctgccgcgcgtcgtcgtccggacgaagaaacccgtgccatcggccgcctggtcctggatgcctcgttctcgccggtccgccgtgtcgcctacgccgtggaagcggcgcgtgtcgaacagcgtaccgacctggacaagctggtcatcgatatcgagaccaacggcaccatcgatgccgaggaagccgtgcgcaccgccgccgacatcctcagcgaccagctgtcggtgttcggtgacttcacccaccgcgaccgcggtgcggccaagccggccaacaacggcgtggatccggtgctgctgcgcccgatcgacgatctggagctgaccgtgcgttcggccaactgcctgaaggctgaaagcatctactacatcggcgatctgatccagaagaccgaagtggagctgctgaagaccccgaacctgggcaagaagtcgctcaccgagatcaaggaagtgctggctcagcgcggcctgtccctcggcatgaagctggagaactggccgccggccggcgtcgccagccacggcatgctgggctgatatcggtaatgcctggaggctccaccgctcgcggtggagccttcaacgcaacacaccatgccacgacgaaccgcaggttcgcgggcaggtcgtccaggacgggcggccaggaccaaccgcagtccgcgcagtaacgccaggatggcgacaacgatccacacagccgcatcattaaccaaggaatatcaccatgcgtcaccagaagtctggccgtaagttcagccgcaccagcgcgcaccgcgaagcgatgttcaagaacatggccgcctcgctgttcaagcacgagctgatcaagaccaccctgccgaaggccaaggaactgcgccgcgttgccgagccgctgatcactctggccaaggtcgactcggtcgccaaccgccgtctggccttcgcccgcctgcgcgacaacgaagccgtgggcaacctgttcaccatcctgggcccgcgctacgcgaaccgtccgggcggctacctgcgcctgctgaagtgcggtttccgcgccggcgacaacgcaccgttggcctacgtcgagctggttgaccgtccggtcgtggccgaggaagtggccgagtaatcggaccgctccaacgcgacacagcgaaagcccggctcctgccgggcttttgcgtttccaggggtcggatccctttccgcaggaaagggctctgaccccgagcaggcagcaccgcaggtcagatccctttgcattcgcaaagggatccgacccgcaccgttccgacaggcgtcacctgtggcggttcgaatggggcgcgctctcggttacgcttggcgccttgatccattcgagcgttgacgatgaatccactgcgctggcccttccgcgcccagttcttcctgggcttcctgatctgcgcgggcctgctcggctacgcgatcttcctgcagctgaagatgggcctggagccgtgcccgctgtgcatcttccagcgcctggcttttgccgcgctgggcctgttgttcctgatcggtgcgctgcacgggccgtccaaccgtcccggccgcgccacctacggcgtgctcgccttcatcgcggcggccgtcggcatgggcatcgctgcgcgccacgtctacgtgcagatgctgccgccggagatgggcgcgacctgtggcccgccgctgagcttcctgcgcgagaccatggggccgctggaagtgttccgcacggtgctgaccggtaccggcaactgcggcaacatcgactggacgttcctgggcctgaccatgccgatgtggtcgggcgtgtggttcgtgctgctggcgctgtgggcactggtggtgtcgctgcgcaaggtcaagcgctgaagcaggatggggtcggatccctttgcatcgcaaagggctctgaccccatttccggtgcggggtcagagccctttcctgcggaaagggatccgacccctgtctcctcagaagtcctgctgcaggctcaggtaggcgccgcggcgcggtccccattgcggggcgaacacgccgacaccgccgccatcgcgcagctggtagctgcgatccaatgcgttgatcacggccagctgcacgtgcagcggatggccgctgtcggcattgaaatcatgcccggcgctgaggttcacctgcaggtaggacggcagctcgccgccgttgggcacgccctcgatatccgaacgcaggccgctgccgaacacgtagttggcaccgacccggttgtgcccggcgaaggcgtagctgaagccccccgacgacgtcagcttctggtcgtggtccaggtggatccagtggtcggccacataggccagcgcgtccggatcgaggttgtactggctggtgatgacctgggtgccgatggccttgttgtacgccgcgttgaagtaggcgctgaacggaccgttgctgtagtcggcactgaactccagcccacggatatggccgcggcggtagttgaacgtcgagtagatgtaggcggcgccgaactggccttcgtcctgcaggcgcgcgacgcggcggtcgtaggcgtccaggcccagggtcaggtgttcacccagctgctgcgagacgccgatgtcgtagtagtcgctgcgttcggccagcggaatgttgttgccgccgcccggctgctggttggtggtgccgtcgtacagggcgatatcgctgctggcgatcagctcactggccggtggcgtgaagtaacgcgaatagccggcatgcacggtggtgctgtcgctggcattccagaccgcgcccacgcgggggctgagctggccctcggtgcggccgaaggccttgtagcgatcaccacgcaggccgtagttcactgtccagtcgtcgccgatcttccactcatcctgcacgtacaccgccagcgtactggcgtggaaggcgctgcggtctggaatcagcagtggcgtggtgctggattgctggccggcgccatcgaccgggaacacccagctgttgttgctggcgcgcgcattctcgtagttgccgtacaggccgtagcgcagcgtgtggtcgttgcccagcggggtggagaagtcggcctgcagcgtgttggcgcggttgctgcgctggacctgcgaggcgacgccactgaataccagatcgccgatgacatccgggttgaacgccacgtcgctgtagcgctgcccggcggacagctggtaggcggtgccgcccagcgtgccctgcagcaccagcatgccgaagcgggtggtctcgcgctgggtttcatccagctggctggagtcgaaggtggtcgtgtccaggtaaccgaactgcggggtctgcccgggattgaccgggatctggaagcgattgttggcaaagccggcgaacacgctcaggcgggtgttctcgttgaccaggtaggtcaggtcggcgaaggctttgccctggtgcgtgtcgtcgtgcagcggcttgcgcgagcgggtcgggttctccaggccgacctcgttctggtcgtagttgccggtcaggaaccagctccagcgcccttgattgccccaccacgaggcattcggattgatcttgccgaacgagcctgcggtcagaccggcgctgccgccattgccgagctcggcgccgctgcgggtggtgatgtcgaccaccgcagcggtgcgctcgccgaactgcgccggcagcgccccgtccatcaggcggatgctcttgatggtgcgggcatccagggtctggccgaagccggagatcgattcgggcagcagtacgccgttgatgcggtactgcaggttcgcgtggtcgccgcgcacgtgcacgccaccgtaggaatcctggaccacgcccggagcctgcagcagcacctggctgagcggcgcggaggcacccagcggctgcttctggatgtcctcggcggtgatctggtactggctgctgccgatgtccggcgacagcgcattgcgggcctggtcgagctgggcgctgacagtgaccgtgtcgaggtccttcacgggagcggcggcatcggcggccatagcgagggtgggcagactggccagggtcagggcgaaggtaatgccggtagcgagcagggagggcttcatggcagataggctgtggaaggggccgacggggatgcagtgttacttcgtaacagtgcgtggcgaatcatgcgcctgtccgggcggccgtggccatgcggtttctggccgatcgcgatgccctttccccggcgttcagtcatgtgcagggcgtgcccagccctttgcgccagcggctggctctgcgaccatgaccgcccccctccccggaagtctgcaatgagcctgtccgccgttccgcccgtcctcgatcctgccgcgaccgccgctggcgctgcctggtcgccggagagctggcgcggcaagaccgcgctgcagatgccgacctacccggacccggtggcgctggacgctgcactgcatgagctgaagcggctaccgccgctggtcacttcgtgggagatcctggcgctgaagcaacagttggccgaggcccaggaaggcaagcgtttcctgctgcagggcggcgactgcgccgagaacttcagcgactgcgaatcgggcacgatttccaaccggttgaaagtgctgctgcagatgagcctggtgctggtgcatggccttcgccagccggtgatccgcgtcgggcgctttgccggccagtacgccaagccgcgttcggccgataccgagacccgcgacggcgtgaccctgcccagctaccgcggcgatgtgatcaatgcgccggcgttcaccgaggcggcgcgcctgccggatccgaagcggatgctgcaggcgcatgcgcattcggcgatgaccatgaacttcgtgcgtgcgctgatcgatggcggcttcgccgacctgcatcatccggagtactggaacctggagtgggtgcggcattcgccgctggccgccgagtaccagaagatggtggcgtcgatcggtgatgcggtgcacttcatggaaaccctggccggggcccgcgtgcacaacctcaaccgcatcgacttctacacctcgcatgaagcgctgctgctgccctacgagcaggcgctgacccggcaggtgccgcgccagcagggctggttgaacctgagcacgcattacccgtggatcggcatgcgcaccgccgcgcttgacggcgcgcacgtggaatacctgcgtggcgtgcgcaatccgattgcgatcaaggtcggcccgtcggtgacgccggaccagctgctgcgcctgatcgatgtgctcaacccgcatgacgagccagggcgactgagcttcatccaccgcatgggggcagcgcagattgccgataagctgccgccgctgctggatgcggtcaagcgcgatggccgtcgcgtgctgtgggtgtgtgacgcgatgcatggcaataccgagagcaccgccaatggcttcaagacgcgccgcttcgacaacgtgcgtggcgaagtggagatgtcgttcgatctgcatgcggccgcaggcacgcgactgggcggtgtgcacctggaactgacgggcgaagacgtgaccgaatgcaccggtggcgcgcgcgaactgaccgagcgcgacctggaacgcgcgtatcgttcgacggtggacccgcggttgaactacgagcagtcgctggagatcgcgatggcgatcgtgcgcaagcaggagcaggtgcggtaagggcgttgcggcagggcttgcagccctgcacctgctgacgcaacggcaacggcaacggcctaagcaacggcaacagcatgcattccgtgggatggcggggcgatgtgggcaggcaggacacgccgtgaacccccctccggggtccggcacagccgccagcggctgggccggaccgcggagcgggattcacggcgtctcccgcaaccggccccactccgccatcccacaggaagcccgcttctgcttcggctgttgctgttgaggttgccggccagcggccggcactaccgcatgtacagggctgcaagccctgccgaccaacacgctgcttacgaacgactgacgtggcgctcatgcgccatgcgcgagtctgtccacttggctgttcgagtggaggtggcaacggtgcactggcaaagcgcacaggcatacgcatggccgttgggattggccgtagtggtgggcggcatcggcgcgtggctgatcctgtggatctaccatcggctgaaggggcgcgatcgtcggcgcgcgcgtatcgggcgtgtgctcgggctgccgatggccaccgcatggccgctgctgctgttgatccctgcattgcaggccacgccgctgcaggatcccgttctgggcaacctgcaacgggtgctgcatatcgcgctgaccgcgtgcttcatctggctgctggtgcgggcggtggcggcgggcgaacgtgccatcctgcgcagccatcccatcgatgtctccgacaacctggaagcgcgccgcatccagacccagacgcgggtgctcagccgtgtgctgatgggcggcatcatcgtgctgggcgcatcgctggtgctgctgaccttcccgatggtgcagaagatcggcaccgcgcttctggcctcggcgggcctgatcggcctggtggccggtatcgccgcaaagcccgtgttcggcaatctgatcgccggcctgcagatcgcagtgacgcagccgatccggctggatgatgtggtgatcgtcgaaggcgagtgggggcgcatcgaggagatcggcagcagctatgtggtggtgcgcatctgggatgagcggcgaatggtggtgccgctgacctggttcatcgagaaccccttccagaactggacgcggcgcagcgccgacctgctcggcaccgcgttcctgtggctggactatcgtgccccggtggcagcgatccgtgccgagctggaacgcatctgccgcggtgaagcgctgtgggatggccgggtctgcgtgacccaggtgaccgagaccagcgagcgcgcgatccaggtgcgcctgctggtcagtgcgcgcagctccggtgatgccttcgatctgcgctgcctggtgcgagaacgcatgctcgatttcctcgcgcgcgagcatccgcagtcgctgccgcaggtgcgtgcgcggctgcagcatgcagacgaactggacatgccgcgcggtccacgtgcgcgcactgcggatgtgcgttcgccgggggctgaagacggtgaggcggcgatcgtgccggtggagcccgaccagccgctgtagagccgagccatgctcggctgctttcgattttccgttgaagccgagcgtgggctcggctctacagaaacacgatcacggctcgccggcgtcgatcagggtgtcggtgtcgaagtgcggcgggcgtcgcgcgcgggtgcgctgttcgtaggcgtaggccatttcgatcagcttcggttcgctccaggcggtgcccatgaacagcaggccgaccggcaggccattgatctggcccatcggcacgctgaggctgggatagccggcgacggcggcggcgctgtagctctcgccggggaagtcgtcgccttcgctgcggatcggccacgccacaccggtggtcggcgccaccagggcatcgagctggtgggcggcgagggcggcgtcgatgccttccgcgccggccagccggcgcgcatcgctgcgtgcacggatataggcggggtcggccaggccggcggtagcgtcggccgccaccagcagttcctggccgaacaggcccagctcctgcttgctgtgcgcctggttgaaggcgatcaggtcggccaggctgcgtagtggcgcgcgatgggtgctgaagtagcgctccagcccggccttgaattcgtacagcagcaccgtgcgttccgcctcggcccaggcgccctggttgggcagctccaccggcaccacgaaggcacccgcccggcgcagctcggtggccgcctgttcgatcagcggcggcatgccgcggtatttcagcagcggtgtctgcagcaggccgatgcgcttgccacgcaggccctgcgggtccaggcgcgcggtgtagtcgtacaccgcgcggccaggcatggtcgccgtggccgggtcggcatcgtcgcggccggcgatagcggtcagcacggctgcagcgtcggcgacgctgcgggtcatcggtcctgcggtgtcctggctgaaggaaatcgggatgatgccctcgcggctgaccaggccgacggtcggcttgaggccgacgatgccattgaccgccgcagggcagacgatgctgccgtcggtttcggtgccgatcgccacgctggccaggttggcggcgaccgccaccgcgctgccgctgctggaaccgcagggcgagtggctgaggcgatagggattgcgggtctggccgccgcgtgcgctccagccggacaccgaatcgttgccgcggaaattggcccactcgctgagattggtcttgcccagcaccaccgcgccggcgtcgcgcagccggcgcaccaggtaggcgtcgtccgggcggaacccctgcagggccagcgagccggcgctggtggccatcggggcggcgttgatgttgtccttcagcagtaccggaatgccgtgcagcgggccgcgcaggcgtccatcacggcgctcgcggtcgcgcgcagcggcttccttcagtgcatccgggttgagctcgatcaccgcgcgcaggcgcggcccggtgcggtccagggtggcgatgcgctgcaggtaggcctgggtcagggtggtgctgtccagctcaccggcgctcatccgcgcctgcaggtcggtgacatcggtttcggcgtacgggaacggcacgttgcggctcgcgggttcggccgcatgcgcgctggacgcggccgggctgcagccagccgaaagcagcgcaggcagcgcggcaagcaggcaggtcagcagaggcggcaaggacgggcgcatggggcggcttggtcggctccaatccccagtgtagccggtgctcagcggtggcgcttgcgcaggtcgcgggcgaggacgtagaccacgatcaggttgatcgccaggatcgtccacgatggccagccgggatggcggatgatcgcgaagatgtcgaaaggcaggtacagggaggcggtcaggcagcccagccaggaggcccagaccttggcccgccacaggccccaggcttcgaccaggtgcagcaggccgtagccgatcatccccgccgcggccaggtgcaccgcgtcggggctgatcatgtgcagcagcgagggcagggtgccatggtccggatccaggctgaaacgccggatcaggaccatgatgccgtgccgcagcggctgcggtccgagcacttccagcccggtggcggccaacagcgccagcatcgccttgctcgcttcgagcagggcgatgacgtggaggcccggatgccggtgcggatccgggttgtagccgctctggtccacggggtgctggctcagccgccgcgcgaagccttcttgcggtcgctttcggtcaggaacttcttgcgcagacggatctccttgggggtgatctcgaccagctcgtcgtcttcgatgaagtccagggcctgttccagcgagtacttgatcgccggggtcagctggatcgcgtcgtccttgcccgaagcgcgcatgttggtcagcggcttggtcttgatcgcgttgacggtcagatcgttgtccttggagtggatgccgaccagctggccttcatacacgttgtcgccttcggcagcgaagagcttgccgcgctcctgcagcggacccagcgagtaggcaggagtgacgcccggcgcattggcgatcatcacgccgttgatgcgcttggcgatcgcgccctgttccttcggaccgtaatggtcgaacacgtggaacagcaggcccgaaccctgggtcagggtcttgaactcgttctggaaaccgatcaggccacgggccgggatctggtattccaggcgcacacggcccttgccgtccggttccatgttcttcagctggcccttgcgggtacccagcttttccatcacgccgccctggtggatttcttcgatgtccaccaccagctgctcgatcggctccatcatctggccgtcgatttccttgatgatcacttccgggcgcgacaccgccagctcgtagccttcacggcgcatgttctcgatcagcaccgacaggtgcagttcgccgcggccggagaccaggaacttgtcggcgtcttccagctgttcgaccttcagtgccacgttgtggacctgctcgcggtccaggcggtccttgatctggcggctggtcaggaacttgccaccggacaggtccttgttgccggcgaacggcgagttgttgacctggaaggtcatcgagatggtcggctcgtcgacggtcagcgccggcagggcttcgggggtatccgggtggcacagggtgtcggagatggtcagctccggaatgccggagatggccacgatgtcaccggcctcggccgtctcctgctcgatgcgctccaggcccaggaagcccagcacctgggcgaccttgccgttgcgcttcttgccttcacggtcgatgacggcgacctgcatgttcttcttcagggtgccgcgctggatgcggccgatgccgatcacgcccacgaagttgttgtagtccagctggctgatgcgcatctggaacgggccgtccgggtccacttccggacgcggggcgtgctgcatgatcgcttcgtacagcggggtcatgtcgccgtcgcgcacggtgtcttccaggccggcgtagccgttcagggccgaggcgtagacgatcgggaagtccagctgctcattggtggcgccgagcttgtcgaacaggtcgaagacctggtcgatcacccattccggacgcgcgcccggacggtcgatcttgttgaccacgacgatcggcttgaagcccatcgcgaaggccttctgggtgacgaagcgggtctgcggcatcgggccgtccatcgcatcgaccaggatcagcacggtgtcgaccatcgacagcacgcgctcgacctcaccaccgaagtcggcgtggccgggggtgtcgacgatgttgatccggttcttgatgccggtcttcttgtcttcccaggtgatggcggtgttcttggccaggatggtaatgccgcgttccttttcctggtcgttgctgtccatcacgcgctcggcgaggacggtacgctcggacagggtgccggactgcttcagcagctggtcgaccagggtggtcttgccatggtcgacgtgggcgacgatggcgatgttgcgaagattttcgatggacatacgaaagggggccagtcggcgccggatttggaaaaagaagtccaacattatacgtcgaacttgacgattcgcgaaaaggtggatttcacgcctgtcccggggcccattcagctgggcatccgccgccccggccggggccgccaggacccggctgcgcggctccccgtccgggggctgaagcggggcgcttcaccaatggtcgaagccgccgccgacacgaggcgggtgtaaactaggtggctagacgcattcccctttgcatcaaggatcttcatgtccctcatcgccactttcgacaccacccagggcccgatcaaggtcgagctgttcgccgacaaggcaccgctgaccgtggccaacttcgtgaacctggtcaagcacggcttctatgacggcctgatcttccaccgcgttatcgccgacttcatgatccagggcggctgcccgcagggtcgtggcaccggcggcccgggctacaagttcgaagacgagaagcatggcgtgaagcacgaggtcggctcgctgtcgatggccaacgccggcccgaacaccaacggcagccagttcttcatcacccacatcaagaccgattggctggacggccgccacaccgtcttcggcaaggtcctggaaggccaggcgatcgtcgattcggtcaagcagggcgacgtgatccattcgattaccctggaaggcgacgtcgacgccgtgctggccgcccaggccgaccgcgtcgcggagtggaacaagcacctcgccgcctgatcccccttcgaaacggccacccacgggtggccgtttccctgttccccgccgcccgccaggcctgcgtggctctgcccgcggcgtcccatcaaacgcttgcaagcaagaggaaacccccatgaaagcacccgttcgtgttgccgtgaccggcgccgccggccagatcggttatgccctgctgttccgcatcgcctccggcgaaatgctgggcaaggaccagccggtcatcctgcagctgctggaactgccggtcgacaaggcccaggccgccctgaagggcgtgatgatggagctggaagactgcgccttcccgctgctggccggcatggtcggcaccgatgatgccgaagtcgcgttcaaggacgccgacatcgccctgctggttggcgcacgtccgcgtggcccgggcatggagcgcaaggacctgctgctggaaaacgccaagatcttcaccgcccagggcgcggcgctgaacaaggtcgccagccgtgacgtgaaggtgctggtggtcggcaacccggccaacaccaatgcctacatcgccatgaagtcggccccggacctgaagccggaaaacttcaccgccatgctgcgcctggaccacaaccgcgcgctgagccagctgtcgaccaagctcggcaagccggtcggtggcatggagaagctggtcgtgtggggcaaccacagcccgaccatgtacccggactaccgtttcgccaccgccgatggcgcgtcgatcgccgatgcgatcaacgaccaggaatggaacgccaacaccttcatcccgaccgtgggcaagcgcggcgcggcgatcatcgaagcccgtggctcgtcctcggccgcttcggccgccaacgctgccatcgaccacgtgcgtgactgggtgctgggcagcaacggcaagtgggtcaccatgggcgtgccgtccgacggttcctacggcattccggaaggcgtgatcttcggcttcgcagtgaccaccgagaacggcaagtacaccctggtgaaggatctgccgatcgacgacttcagccagaagtacatcgacaagaccctggccgagctggaagaagagcgcgccggcgttgcccacctgctgggctgatgcaggcggtaccggctcgagccggtacctctttcatcgaggtgggtgtcgaccgctggtcggtacattcccatcgaggtaggtaccgaccgttggtcggtacatttccatcaaggtaggtaccgaccgttggtcggtacgcagaacggggaagcttcggcttccccgtttctgtttggacggatacggagccgcatgatccacctgcattacatcgacgacgcgctgctggtggccgagaagccggccggcctgctgtccgtgcccggccgcggcgccgagaaccaggattgcgtggtcgcgcgcctgcaggcgctgtacccggatgcgttgaccgtgcaccgcctggaccaggtgacctccggcctgctgctgcatgcgcgcggcaaggacatgcaggtggcgttgtcgatgcagttcgagcagcgccaggtcggcaagcgttatgaagcgatcgtggaggggctgcttgaaggcgatgccggcgacgtggacctgccactgatcgtggactggccaaaccggccgaagcagatgatcgatcacgaacgcggcaagccggcgctgacgcgctggcgcgtaatggcgcgtgatgccgaagcgcagcgcacgcgcgtggcgctggagccggttactggccgcagccatcaactgcgcctgcacatggccagtctcggccatcccatcgttggcgatgtgctgtatgacgccgcgcctgcgcagcgcgtgcatctgcatgcgcgcagcctgcggttcacccacccggtgacgggcgacgcgctcgcgttcgagtccgccactccgttctaggggttcggcagggcttgcagccctgcacctgctacgaaccggagcaacgtcaaaggccaaggtggctctggtcttctgcttgctgggcggggcggtgtgggttggcaggacacgccgtaactccccctccgggggccggcccagccgctggcggctgtgcgttcgggcgcttgcaaagcagtgcttcgcaagcaaagcgccctcacccatggcgccaacggtcctgccaacccacaccgccccacccccgacagattcctgcggcggttggtaacggctgtcgctgttggtcttggtaggtgtcgaccttggtcgacacgatttttctgtcagatatcgaattgaatattgaatctggggatccgaccccgtgctccgacagatcgcggaagtctgtcgaaggcggggtgggtccggttgcgggggcgtgagccgcatggatgcggcgaccgagcctccatggacggattcacggtgtcccccgcaaccggacccacctcgccatcccacgggaaacccgctgttgcttcggctgttgcttctgaggttgccggccagcggccggcactaccgcgggtgcagggcgcagccctgcatgaaaaccccaccccctaccaaggtagggcggcccgcgcggcagcgccggactatcctcgaacccatgactttgtctgggagggctgcgtcatgaactacgaggaaacctaccgtcgctcgatcgacgagccggaggccttctggggcgaggaagccaagcgcatccattggcacaaaccgccgcagcaggtactcgactacagcaacccgccgttccggcgctggtttgtcgggggtgaaaccaatctctgctacaacgccgtcgaccgccatctggccgagcgcgccgaccagctcgcgctggttgccatttccaccgagaccagcagcacccgcgagatcacctatcgccagctgtatcgggaagtgaacgacttcgctgccgtgctcaagcacctcggcgtcggtcacggtgaccgtgtggtgatctacatgccgaacatggccgaagcggtattcgccatgctcgcctgcgcgcgcatcggcgccgtgcattcggtggtgttcggtggcttcgccgcgcacaacctggcgctgcgcatcgacgatgccaagccgaagctgctgatcgccgccgatgccggcatgcgcggtggcaagctgattccgtacaagccgatggtcgatgcagcctgcgccgaagccacgtcgccaccgccgcacgtgctgatcgtgtcgcgcggactggatgccgccgaaccacgcgtgccgggccgcgatgtggagtacgccgcgctgcgtgcgcagatcggtgaggtcgacgtgccggtgcagtggctggaatcgagcgagccgagctacctgttgtatacctcgggcaccaccggcaagccgaagggcgtgcagcgcgatgtcggcggctacgcggtggcgatggcacagtcgatggaaaccgtgttcgactgcaggccggggcaggtgatgttctccacgtccgatgtcggctgggcggtaggccattcctacaatgtgtacggcccgctgatcggcggctgcacctcgctgctgtacgaagggctgccgaccaacccggacccgggcatctggtgggcgctgtgcgagcagtacaacgtgcgcacgatgttctcgtcccccactgccatccgcgtgctgaagaagcacgatgcggacttcatccatcgccacgacctgcgcgcgctgaaatacctgttcctggccggcgagccgctggacgaaccgaccgcgcactggatcagcgaagcgctcggcaagccgatcatcgacaactactggcagaccgagaccggctggccggcgctgaccctgctgccgggcctggagatgaagccggtgcgcttcggttcgccgggcttccccaacctcggctaccggatgaaggtgatcgacgagaacaccggcgaggaagtcgcaccggggcagaagggggtgctggtggtgtcgccaccgttgccgccgggctgcatgagcacggtgtggaacgacgacaaccgtttcctgcagagctacttcagccacttcaaggaactgctgtacagctcgctggactgggcaatccgcgacgacgatggctacaccttcatcctcggccgtaccgatgatgtgatcaacgtggccgggcaccggctgggcacgcgcgagatcgaagaggccatttcgagccacccgcgcgtggccgaggctgccgtgatcggggtcaaggacgaattgaaggggcaggtgccgctggtgttcgtcaccctcaagcagggcctggatggcgaggatccggcgcaagtggtggccgagatgatggccacggtgaccacctcgctcggcgcagtggcccgcccggcgcacgtgcacgtggtcaacgcgctgcccaagacccgttcgggcaagctgctgcggcgctcgttgcaggcgctggccgagcagcgcgacccgggtgacctgtcgacgctggacgaccccggcgcgctggaggagatccgccgggcgctgggccgttgatccggtcgtgccggccactggccggcacccccatccaccccgaggttgccggccagcggccggcactacccgcagtacttgcgctaagctcggcctgtcatcgacctgcaatacgcggctcgcgccggggaacgcgcgtgccgtccggagatggcaacacaggggggcgtgcccgcgagggcgcgccggcattgcgcatcgagcgagggggaggcaatggcattgctgcacgccaagacggctgctggccgtcaggaaatcgaagaccgtagccggcgcctgccggcggcattgcgttcgatcctgctgatggtcgatggccatcgcaacgacaccgaactgcgtggcctgttcgaaggcctgcgggcaccaccggacgcactggagcaattgtcagcacagggcctgatcgaagtgatcggcggaagcgcagaggtggcgccggcgcgcggcatcagcaccgggcgcgaacaggacccggcgctgtaccagcagttgtacgacgcgatgagcgaggcggtgcgccgccacctgggcctgaagggctacttcatgcagttgaagatcgaacgctgcaccgatgcgctggcgctggagcgcttgtgcccggagttgctggcggcggtgggcaaggcgcgcagcccggcattggcgcagcgctggtggcaggaaacccaggcggcggtgctgaacgctggcagtgaggtcgtgcaggcctgagccaccgcgtaaagtgatcggttcacttccctacaaggagtcccgcgtgcaggacgaccacgacgacaccgacaccccaggctgggacgcgatcaatgcggcgctggcgccgctgtatgccggccaggagccgcgccacttcggcaccgcgcttccgtacacgctcggtggccaggatccactggatggcatcagcgtgtactgggcggatgcgccggtaccgcactggcattacatcacctacggcttctccgagctgtacgccaaggagagcagtgatgcagatgccagcggttatggcttcgagctgaccttccgtctggctgccgaggccggtgagaacgccggcagcaccccgccggtgtggccgatgaacctgctgcagaacctggcgcgctacgtgttcggcagtggcaacgtgttcgaggatggccatcacctcaacgccaacggtccgatcgcgctggagaccggcacgcggctgtgccatctggccttcattgcggacccgcagttgccggcgcgggacacggccaacggccatctgcagttcctgcagctggtcggattgaccgatgaggagatggaggcggtcaagcgctggtcgacgcgtggcgtgctgcaggcgctgctgccggcgatgccgctgtggatcagcgatctgcatcgcggcaatctgctggacgatccggcgctggcacagcgggtgcgggccggcagcgaacgcgagggttccagcaccggcatgctgttcatcgagaccctggactggcggcaggaggcgggcgtcaccacgctggtgctcggcgccggtcaggtcgccagcgtgtgcgaactgttgccgctgcgcctgcgccacggcaaatcgctggaactggccagccgcgaccggcagtgggaattcatcgcgaaccggggcggtgaagcggcggacgtatccgccgacagcgcgcgctggtcactggacgaggcgggcctgcaggccctggcaggggtgcgcgccgagcgcggggtttacccggtggcgggggcgctgcgcatcgaagtggtgccgacctacctgcgcgatgccaagggggaagtgatccgccagatcggctgatcgcgcgaatgatatcgaggggtcggagccgcctgctgcgcaggcggatccgaccccgtctggtggccggtggggtcagatccgtccgccacgcgaacggctctgacccctgaccaaggtcaggccaggccttcggccttcagcgcggcctgcacgccggcatcggcatccatgcgtgccttgtaggcggccagattgtccaggcccgacaggtcgaccttggtgccggcggcccagcgcagggtgatgtagaagtacgggtcggcgaagctgcggaagccggccagccagggcttgtcggccagctgcctgtcggcggtctcgaacaggccacgcaggcgcttgtgcgcggcggcgcggatcgcgtcgtactggccttcgtcggcaatgaacttgcccggcgcgaacagcggcgagaaggccgggtgcacgtcggaattgacgaacgccagccagcgggtggcttcggcgcgctggcgcgggctgccgtcaccgccgaggccggcctgcgggaagctgtcggcgatatagcccatgatcgcggcgttctgcagcagcacgaagtcgccgtcgaccagcgcgggcaccgcaccggccggattgatcttgaggaattccggacccttcagggtgtccttgttcagcagttcaacctcgaacggctggccggtccactgcagggcgatgtggtcggcggtggaacaggcaccgggcttgctgtacagcttcatgggaactccaggtgatgcgggcgggaaacgcccactatcccagagcctgccggcaggcggcaacgctgccgccggcacggatcgttacgactgccgcggcttgaggttctgcaccttatagaaggtgtgatcgccgatggtggccacctggtaggcattgcgccagttcgggctggcgatggacagcgcggcgaagtggctggcaccgggcacgatctcgcggcgctcgccggccggcagcgcccagttgcgctcggcgtcgaaggccacgttcattgcctcgctccaggccgcgtcgttgcccaactgggtgccgggggagacgatggtcggtgcgaactgcttgcgcgcggtgaccacctggcacatcgagtcgccccacaggccactgtcgagacggcgcagtgcgacctcggcgacggcctgctggccgcgcagggtctggtcgcgggcttccaggtaaacggtggtgctcaaacacagtgaatcagcggccggctgcggcaacaactgcgacagccagagaatccaggccagtttcatataactccttgctccgtatgggccgcaccctccggttccggccgcagggcgacaggaggcggggtacgacttggcgtcatggggaggcggccatcggggccgccccgttgggcagccccaaaagaaacgaccagtaccgatcgtggggctgcgccggctcaccggaaactggctggtgagcggaaagatggcgcaaggtaggggggcgtagccgaacgcatcgtgaaccgctcggcttgacattcaggttcaatgagggtgacggaaatcacattccgccccccattcaggcgctcatcagagcccggcggcaacccggctgccctggtcgatggcgcgcttggcgtcgagttctgcggccacgtcggcaccgccgatcagctgcgcgttgatgccggccgcctgcagttcggcctgcagcgcgcggttgggttcctgcccggcgcagatcaccacatggtcgaccggcagcagctgttcgctgccgtccacgcggatgcgcaggcccgcgtcgtccacgccgaggtactcgacgccaccgagcatgcgcacgcccttggccttcagcgtggcgcgatggatccagccggtggtcttgcccaggcgcgcgccgggcttgcccgggctgcgctgcagcagccacagccggcgcggcgaggtttcaacctccggcctggccagtgagccgcgggcctcgaaggtgctgtccacgccccattcggccatccagcgctgcgggtcgagggagggggactcgccggcgtggctgaggaattcgccgacatcgaagccgatgccgccggcgccgatgatcgccgcactggcgcccacttcgacccggcccagcagtacgtccagatagctgaccaccctggcgtggtcggcaccggggaaatcaactctgcgcggcgtgatgccggtggccagcaccacttcgtcgaagccggtcagctgggcggcatcggcgcgggtgccgaggcgcagctgcacaccggtttcggccagtttgtggcggaagtagcgcagggtctcgtggaactcttccttgccggggatgcgcttggccacgttgaactggccgccgatctcatcattggcgtcgaacagggtgacctggtggccgcgctgggcagcgacggtggcacaggccaggccggcagggccggcaccgaccacggcaatcttcttcggcgtggcagtggggtgatagaccagctcggtctcgtgcgcggcgcgcggattgaccaggcagctggccagcttgttctcgaacacgtggtccaggcaggcctggttgcaggcgatgcaggtgttgatcgcctcggcgcggccggcacgggccttgttcggccactgcgggtcggccagcagcgggcgcgccagcgacaccatgtcggcgccgccattggcgaggatgcgctcggcgacgtcgggcatgttgatgcggttggtcgccaccagcggcaccttcacatgcggcttgagcttggcggtgaccccggcgaaggcagcacgcggcaccgaggtggcgatggtcggaatgcgcgcttcgtgccagccgatgccggaattgatgatcgttgcgccggccgcctcgatggcctgcgcctgctgcacgatttcttcccagctgctgccgtcgtcgaccagatccaccagcgacaggcgatagatgatgatgaagtccgggccgcaggcctcgcggatgcggcgtacgatctcgaccgcgaagcgcatgcgttggcgcgcgtcgccgccccaggcatcggtgcgcttgttggtgcgcggggcgatgaattcgttgatgaggtagccctccgaacccatcacttccacgccgtcgtagccagcctcgcgggccagcttcgcgctgcgtgcgtaatcggcgatatgccggtcgacgccgctggccgacaacacgcgcggggtgaacgggttgatcggtgccttcagcttcgacggtgccaccgacaacgggtgataggcgtaacggcctgcatgcagcagctgcaggcagatcttcgcgccgtgctggtgcgcggcggcggtgagctggcggtgcggccgcacttcccagggccaggacagcttgccgccgaacggcttcagccagccgaccacattcggtgcgaagccgccggtgacgatcaggccgacgccgccctcggcgcgctcggcgaaatacgccgccagccgcgggaagtcgcgggcgcgatcctccaggccggtgtgcatcgagcccatcaatacgcggttgcgcagttgggtgaagcccaggtccagcggggcgaacagatggggataggcgctttcgttggctggcgacatggtcgatacgcttgcgtacggaagcgcgaagcgtgccgcgaaacggcggccggggcaagggccgctggccgggtacgctcggcacatgcgtgctgtcgctcccgcgtttcgctgcgcgaatcgcgggccccacttaccggcctccaccccccgcgcctgcggcgctgcccccgaaccccgggggcggtagtgccggccgctggccggcacacggggcagctcagggcgattgcggctgccgggcagcggcgggtacgaccggggggcggccgatcccgaaccagcccagcgtgacgccgcacagcgggccgatcagcagggcgaaggcgagggtgccgaggccgacattgccgcccagccaccagcccagcagcaatacgctgccttcgatcaggctgcgcaccttccagatcggccagccggtgcgggcatgcaggccagtcatcaagccatcgcgcggtcccgggccgaggcgggcgccgatgtacaggccggtggccagcgcgaccagcagcatgcctgcacagaacatcgccagctgccagcccacgccgatggccggtggcagcagccacaacccgaactgtgcggagggaccgatcagcatcacgttgagcaccgtgccgacgcccggcttctggcgcagtggccaccacagcaacagcaccagtgcgccgatgacattggtcgccagcccgaaggacagcggcgtctgtgcggcgatgccctgcgacagcacgtcccagggcgccacgccgatggcggcacggatcatcagcgaggcaccgaagccatacaggaacaggccggtgatcagttgcagcaggcgcaggggcagggcggtaggcatggtgggctcgggggaggggagatctgtttccaccgtatccctgatttccttgagcccatagatacagatcccagccaatccgctggtacaggcagcgccgatcctgcaggcgggcggttgagcagggccgcgcccgtgctctgctggtggcggcaggcgtagcagcctggcgtgggctcggcctacatcacggcgtcagttgtcccagcccaccagcgccagcttgcccaccgtgtgcccgctggccaggcgctgatgcgcgatgtccaggttggccgcattgatcgtgcccagcgtttcactgagcgtgccacgcagctggccggcatcgatcatgctggcggcgcggctgaggatgcgatgctgttcgatgcagtcggcggtggcgaagcgcgagcgcgcgaacatgaactcccaatggatgccgatgcatttggccttgtacggatcgccgatgcgcagtgcgccacgcggctccacgatcaggccgacatggccctgtggtgccagcagctggcccagttcgtcccagtagtgatcggtgtcggccaggttgagcgccacctgcactgcgtcgatgcccagtgcctgcggctggggctgcagcggctgccgatggtcgatcacatgcgtggcccccatctgccggcaccagtcgatcgaggcctcgcgcgaggcggtggcgatcacctcgaagccggcatggcgggccagctggatcgccatcgagcccacgcctcccgcaccgccgatcaccagcaggtgctggccgccatggcggcgatcatccaggtgcagcggcatgcgctggaacaacagctcccaggcggtcagcgtggtcaggggtagtgcggcggcttcggcgaaatcgagcgtggtcggcttgcgggcgaccaggcgctcgtccacccactggtactgggcgttgcagcccggccgggtaacgtcaccggcgaagtagacctcgtcaccggaggcgaacaggctggcctcgtcaccgatggcttcgaccacgccggcggcgtcccagccgagcacccggggaacctcaagggtggccggatcggtagcggcccgctgcttgccatcgacggggttgaccgataccgcttcgatccgcaccagcagatcgcggccgcgaggaggcagcggcggcggcagcaggacatcacgcagggcaggtgcgtattcacgactcagggcgacggctttcatcacggctccggctgggttcgtgatcccatcataaggttcctcacgtttccgcaaacctgctgaaccgtgcgatgcagtgtgctgcgcagtatgtcggttttcgcgcttaaaccccgtcaaacccttgcagtgtgtgggtcttgcggattttcatcatcctgtatagggtttcaacgtcggaccggtcgacggtcaggcgcaacacttcacatgttacgggactgttaacatggccttcacccgcctgagcataatgttcgcggcggtggcgtgctgaatcggctgtcgtacatcgacgcactagtgctggcccatgcctctaccggtttcatacccccgaaataggagctgtactcaatgaacaagaagatccttactgccgcgctgctgggcggcctggctttcgcccaggcagcttcggcgcaggagttcgatgaccgctggtacctgaccggttcggccggcttcaacttccaggacagcgaccgtctgaccaatgacgctccgttcgtgaccctgggcctgggtaagttcatcagcccgaactggtcgctggacggtgaactgaactaccagaacccgaacttcgacagcaaccaggacctgaactggtcgcagtacggcgtctcgctggacctgcgtcgccacttcatcaaggaaggccgcggctggaacccgtacatcgtcggtggcctgggctaccagaagtcggaagaagagtacgctgcaatcgacaacaacggtccgcgccagcgtaaggacggcaacgttgccgccaagctgggcgtcggcctgcagaccaccttcgagaagcgtgttgctgtccgcgccgaagtggcctaccgcgctgacttcgacgaccagagcatcgccgccaaggacgagagctggttcggcgacgtgctggcttcggtcggcgtcgtgatcccgctgggcccggctccggtcgcggctgctccggctccggctccggttgccccgagctgcgccgacctggatgacgacggtgacggcgtcaacaactgcgacgacaagtgcccgaactcgcagccgggtcagaccatcggtccggacggttgcccggttccggtctccatcgacctgaagggcgtcaacttcgacttcgacaagtcgaacctgcgtccggacgccgtggcgatcctgagcgaagccaccgagatcctgaagcgttacccggatctgcgcgttgaagttgccggtcacaccgactcgaagggtaccgacgcttacaaccagaagctgtcggagcgtcgcgccaccgccgtgtacaactacctgaccaagaacggcgtcgacgccggtcgcctggtcggcccgatcggctacggcgagagccgtccgattgctccgaacaccaacccggatggttcggacaacccggaaggtcgcgccaagaaccgtcgtaccgagctgaacgtccagaactaagttctgacgctctgccagtaggacacagcaggacccggcttcggccgggtcttgttgtttctgcggtccggaacccggcgtttcaggcgcgggagtaaccgttcgtcgggattttgcccataaaaccaatgagttgccgtattcattgaaagtggcgcttgaaagctgtcgcggcattgctaaactcgccgcgtcacttcctttcctggatgcccttcatgctgcgctctgcatcggccgccttcctggcgctggccctggttcccgccgcccacgctgcggtcgattgctcggtcaacaccagcgcctcgccgctgccgttgccggccacgaccatcgcgccggtggccgacgagctctacatccgtggcaaccagctgggcatgccggccggcgtgctgagcagcaactacgatccgtcgcagtcgctggaccaggtgctgcagcgcctgcgcatcgatgggtgccagaacatcgccaaggccattccgagcgcaccggcggtgaagccgaacgatccggcggcctacaagccgcagaccgaattcgacaacacgccctggcgcttcgacatgagccagaacggcaagcgcatgaccgccgaagagttcgacgcctggatgaaggcgcgtggcgtgcgtgtggtcaaggcgcgtccggctccggccgccactccggctgcggccgaagcaccggctgagaccaagccggtcgacaagaagtaagcgcggcggggagcagaggcttgcgcacgcgccgcccacctgctgcccccgctgcccgctcccacgcatcgcgtgggcgtgcggttccggatgtctccaatggcgtgcgccatggcctggcgcgcgtgctgtccaaggccggcgtgtgctcacgcagcgaggccgcgcgctggatttccgatggccgcgtgcgcgtgtccggccgcatcatccgtgatcccgagttcccgattgccagtccgcacccgccgatcgaagtcgatggccggccgatggatgcgccgcagcggctgtacctggtgctcaacaagccgcgcggcgtggtgaccacggcgcaggacgagcgtggtcgcgacacggtgtatcgctgcttcgatggtgccggcctgccgtggatcgcgccggtcgggcgcctggacaaggccagcgaagggctgttgttgttcagcaatgatccgcagtgggcggcgcgcctgaccgatccggagaccggcccacagaagacctatcacgtgcaggtggatcgtcttcccgatgaggacaccctggccgcgctgcgcgccggtgtcgaggacgagggcgagttcctcgtcgcccaggccatgcgcgtactgcgcagtggcgacaagaccgcatggctggaggtggtcctcgacgagggacgcaaccgccatatccgccgcctgttggcggccttcgacctgcaggtgctgcgcctggtccgggtcgcgatcggtgggctgctgctcggcgatctcggcaaggggcaatggcgggtgctggaggtcagcgaccagcagcggctgggggccgctgcaccgggctgatcatcgcccgcggccggcagtcgccggccaccgttccaggcgtagggggcgcctggttgctgaatttcccgaacggagcctgcccatgtaccacccgaccctcaaccaaaccctgcgctgcgcaggcctgctgctgccaatggtgctgctggccgcctgtggcggccacaagaaggtggccaaggcggaaacgcctgccgagaccccggtggtggaagtgaagaccccggagctggatggtcgcggcagttaccgcttcctgatgagcaacggcgacaagaagatgaccgccgatgagttcgatgcctggatgaaggccaacggcatccgcgttgccaagggcaacggccaggacgccgccgccaagccggtagtggtggccagcaaggaagagccgaagggcaagaagaaaaagaagtgacgcctggcggtgccgaccctggccggcacgccctcaggccacggcgggtgccgaccgtggtcggcagccatccagcccgataggtgccgaccttggtcggcacgctttgaccagcggggtcagggccttttccgcaggaaagggatccgaccccggcatgatcagcccttgaccacgcccagttcgacaccaatgcgggtgaacgcatcgatcgcgcgatccaggtgctcgcggctgtgcgcggcgctgatctgggtccggatgcgggcctggcccttgggcaccaccgggaagaagaagccgatcgcgtagatgccttcttccagcaggcgctcggcgaatttctgcgccaacggtgcgtcatacagcattaccgggctgatcggatgcacgcccggcttcacgtcgaaaccggcggcggtcatcttctcgcggaagtaggcggtgttctcggccagcgtgctgcgaaggtcgtcagcggcagccagcatttcgaacgccttgatgccggcggccaccacatgcggcggcagcgagttggagaacaggtacgggcgcgagcgctggcgcagcagttcgatcacctcggcgctggcgcaggtgaagccgcccagcgcgccgcccatggccttgcccagagtgccggtgatgatgtcgatcttctccagcacgcccttgacctcggccgaaccacggccggtagcgccaaggaagccggtggcgtggcattcgtcgatgtgtaccagcgcgttgtacttcttcgccagcgcggtgatctcgtccagcggcgcgatgaagccgtccatcgagaatacgccatcggtggtgatcagcttggtcttgcagcctgcggcatcggcggcctgcagctgcgcttccagatcggccatgtcgcagttggcgtatcggaagcgcttggccttgcacaggcgcacgccgtcgatgatcgaagcatggttcagcgcgtcggaaatgatcgcgtcgttctcgccgagcagcggctcgaacaggccaccgttggcatcgaagcaggccgcgtacaggatggtgtcctgcttgccgaagaaatcggcgatctgcttctccagctgcttgtgcaggtcctgggtgccgcagatgaagcgcaccgaggccatgccgaagccgtgggtatccagtgcgtccttggcggcctggatcaggtccggatggtcggccagacccaggtagttgttggcacagaagttcagcaccttgcggccgtcgtcgagggtgatttcggccgattgcgggctggtgatgatccgctcggacttgaacaggccctgggcgcggatggcgtccagttcctcggcgtagtggcgggtcagggcggaggagacgtcggtcatggcgtgggcacggctctgaacggggaaaccgctgattctaccgggcatcgccggtcatcaaccgggctggatggggcatcgccatgggcagcgcatgttgcatcgcaatagcaaagtggttaagaattcgtgaaccggagctgtcgcgctccggccgctcccgccttccacgccacgccaccgcccccaccggagacgctcatgaagcacgcccgtgcctgcctcgccattgccgctgccctgaccctggccgccccgttcgccgccagcgcgcaggagaacgaatcgccgtacagctggaatgtcaccgccgtttccgactacctgttccgtggcgtgtcgcagaccgacgagaagccgaccctgcaggcgggcttcacctacacctcgccggtgggcctgtatgccggtgtctggggttcgggcgtggacttcggtccgggcgatccgaacaccgagatcgactaccagatcggctacggcgtggacgtcacttcgcgcgtcaacttcgacgtgctgctgaaccgctacacctacctcggtgccagccaccagaactacaacgagctggtgaccaccaccacgctcgacgacacctacaagctgaccgtggcctacaccaacgaccagtggaacagcggcaccgatggctggtactacggcttgggcggcagctggggcctgccgaaggacttcacgctgaatgccaacgtcggtcgcagcaccttcgaggacggcatcgccaaggactataccgactggaacgtcggcgtcagccgccagttcggcctgttcaacgtcggcctgggctactacggcaccgacggcaatggacgcgagaactcgggcaagctggcccacagccgggtgctgctgaccgtggccgtgggcaagtaacgccgcaggcgttacggtaggtgccaagcttgcctggcacgcattgcgaaaaaggcgcccatcgggcgcctttttcagttccgcggtgttcttgatcccatctggggaagagcccccttgttgttcaagggggcgcgccaaaggcgcggggataaggaaacatgcgggggaattgacccttcgggtcagttccagctgagcacgaccttgccggccttgccttcttccatcaggtcgaagcccttctggaactcgtcgatcggcagctggtgggtcatcaccttgccgagcgggaagccggacagcaccagctgggtcatcttgtaccaggtctcgtacatcttgcggccgtagatgccctgcacggtcaggcccttgaagatgatcttgtcccagtcgcagccggcgcccttgggcatgatgccgagcatggcgatcttgccgccgtggtacatgcagtcgagcatgtcgttgaacgcgcgcgggttgccgctcatttccaggcccacgtcgaagccctccatgtgcagctccttcatcacgtccttcagcgactggttggcgacgttgaccacgcgggtggcgcccatgtcggcggccagcttcaggcggaagtcgttgacgtcggtcaccaccacgttgcgcgcaccgatgtgcttgcagatgccggcggcgatgatgccgatcggaccggcgccggtgatcagcacgtcttcgccgatcacgtcgaattccagcgcgcagtgtgcggcattgccgtacgggtcgaagaacgcggccagttccgacgggatctggtccggaatcggccacaggttgctggccggcatcaccatgtattcggcgaaggcgccgttgacgttgacgccgatgccgacggtgttcgggcacaggtgcgggcggccgccacggcagttgcggcaatggccacagacgatgtgaccttcggccgagacgcgctggccgatctcatagccggtcaccgccgagccgagcgcggcaatgcggccgacgaactcatggccgatggtcaggcccggcttgatggtgcgctggctccactcgtcccacagatagatgtgcaggtcggtgccgcagatcgcggtcttttccagcttgatcaggacctcgttcgggcccggggtcggaaccggaacttcttccagccagatgcccttggccgcttcgcgcttgaccagggccttcatcgtttgctgcgccatcggggtggaactcatcagggggaaagcgcggattatagggtgccgcgcggatttcccatgttgcgctgcgggtgcaatggcggaacgaaaggcgtgcgccgacgggcgtttcgaacgtgctgcaaacagcagcgcctccttgagtcctggggagggcgcgcggtcaccctggccgggacacgcaaaagcccatccatggtgctcgatggcgccttgctcgtgcgcgctatcctgcgcacacggcaagaccggggttgggcgtcccgcccaacccgccagtcgcatgcgcccggcccatggcgccaacggtcccggccagggtgaccacgccccctctggacgattccatgtgcgcggccgatgtgcgcatggcagagcaagaagtaggcccatgacttccggggttcgggccgtggcagggcggcgggctacaatcgagggttccattaccaggggctgctccatgcgctcgaacctgcttgcattctccatcgtcgccagcctcgggctggcccaggtcgcccatgccgctgaaggcatgtgggtgccgcagcagctgccggaaatcgccggtccgttgcagaaggccggcctgaagctgtccccggagcagctgtccaacctcaccggcgacccgatgggcgcggtcgtcgccctcggcggctgcaccgccagcttcgtgtcgccgcagggcctggtggtcaccaaccaccactgcgcctacggtgcgatccagctgaattcgaccgccgagaagaacctgatcaaggacggcttcaacgcgccgaagcacagcgatgaactgagcgccggcccgaacgcccgcgtctacgtgctcgaccagatcaccgacgtcaccgcccaggccaaggccgccattgccgccgccggcaacgacccgctggcccgcagccgtgcgctggacgccttcgacaaggcccaggtcgccgcgtgtgaagccgaggacggcttccgctgccgcctgtacaccttctccggcggcaacacctaccgactgttccgcaacatggaaatcaaggacgtgcgcctggtctacgcgcccccgggcagcgtcggcaagtacggcggcgacgtcgacaactggatgtggccgcgccacaccggcgacttctcgttctaccgcgcctacgtcggcaaggacggcaagccggccgcattctcggccgacaacgtgccgtaccagcccaagcacttcctgaagttcaccgaccagccgctgggcgccggtgacttcgtgatggtggcaggctatccgggccgcaccaaccgctacgcgctggccggtgagttcaacgaaaccgccagctggacctacccgaccatcgccaggcactacaacgcagtgttgaagatgatcgatgaggcgggcaaggccgacgccgacgtcaaggtgaagtacgccgccaccgcggccagcatgaacaacgtggccaagaactacgccggccagctggaaggcttcaagcgcatcgacgctgctggccagaagcaggctgaagaagccgccgtgctggcctggctgaagaagcagggcgccgccggcaagccggcgctggcagcgcacgcgcagctggtcaagcacctggataccagcaaggcgacccgcgagcgcgatctgttcgtcggccagttcaacaacacctcggcggtcaacgccgccatcggcctgtaccgcctgtcgatcgagcgcaccaagccggacgccgagcgcgaggtcggctaccagcagcgcgacctgccgaccctggaaggcggcctgaagcagatggatcgccgctatgtggcgaagatggaccagcagctgcagacctactggctggaccagtacgtcgccctgccggccgcgcagcgcaacaacgacgtgctgaacacctggctgggcggcagcgatgccagcgcggtcaaggcactggtgagcaagctgtcgggcactgagctgggcagcctggatgcacgcctgaagtggttcaaggccgaccgcgccgcgttcgaagccagcaccgatccggccatccagtacgcggtggcgatcatgccgtcgctgctgaagcaggaagagcagaagaagatccgcgaaggcgagtcgctgaccgcacgtccgctgtacctgcaggcactggctgactacaagaagagccagggcgagttcgtgtacccggatgccaacctgtcgctgcgcatcactttcggcaacgtgatgggctatgagcccagggacggcgtggcctacaccccgttcaccacgctggagggcatcgtcgccaaggacaccggcgtcgatccgttcgatgcgcccaaggccctgctcgacgcggtcaaggccaagcgctacggcggcctggaagacaagcgcgtgggctcggtcccggtgaacttcctgtccaacctggacatcaccggtggcaactcgggttcaccggtgctggacgccaacggcaagctggtcggcctggccttcgacggcaactgggaatcggtcagctccaactgggtgttcgacccggtgatgacccgcatgatcgcggtcgacagccgctacatgcagtggatcatgcaggaagtggcgccggcgccgacgctgctgaaggagctgaacctggcgaaataaacccgttgcggtagtgccggccgctggccggcaaccccgaccagatagccggagtttccaaaaccccgcgatccacgtcgcggggttttttcatgcccggcacggcccggtgcgccgaacgggtatcatccctgttccgcgcacttcacaggatgtgaacgaaacgcggaacctcctccccccaggaccccttgcacgcatgcgcatcctgcttgcccgccacggcgaaacgccgtggaacgccgaaggccgctaccagggccagatcgacatcccgctttcgccgatcggtgaagcccaggcccaagccctgggcgcccgcttggcctcggtggacatcacccgtgccgtcgcctcgccgctgtcacgcgcgcagcgcaccgcgcagctggcactcggtgccgcccgtgccgacatgttgctgaccgagccggagctgcaggaaatcgcccacggcgagtgggaaggcctgctggccagcgaaatcaacgaaaaggacccgtcgcgcctgaaggcgtggcgcgaggagccggacaccgtgctgatgcccggcggtgaatcgctgcgcttggtgctggagcgcagttggcgcggcctggcccgcgccaccgaaggcctcggcgagcacgacaccctgctggtggtcgcccatgacgcggtcaaccgcgtgatcctgtgcaaggtgctgggcctgccgatctcccgcctgtggaccttccgccaggcgccgaccacgctcaacctgctcgaaggcgccgacctggacagcctggaagtggtgcgcctgaacgactgtgcccaccacacgccgttcttcggcgaagccaagcaccgcgcactctgatccatcccctcgcatcaactgcttctgctggaaccgctgccgtgacgaacaccccgaccaccctggccgactggctggactacattgaacgccagcacccggcgaccatcgacatgggcctggagcgcgtgcgcgccgtggccacggcgatgggcctgggggcgccggcccagcgcaccatcgtggtcggtggcaccaacggcaagggctccaccgtggccttcatcgaagccatcgcgcgtgctgccggctggaaggtcggcgcgtacacctcgccgcacctgctgcgctacaacgagcgcgtgcgcatcgacggccacgatgtggaggatgcggcgctggtcgccgccttcaacaccatcgaggccgcgcgtggcgatatcacgctgacctatttcgagtacggcacgctggccgcgctgcagctgttcgccgacgccgggctggacctggcggtgctggaagtgggcctgggcggtcgcctggatgcggtcaacatcgtcgacgctgacgtggcggtgatcaccaccgtggacatcgaccatgccgaatggctgggcggggaccgcgaagcgatcggcaccgagaaggccggcatcatccgtggctggaagccggtgatcctgggcgagaccgacccgccgtcgagcgtgctcgcacgtgcctacctggtcggcgccaacgcgatccgcggcggcagcgattatttctacgaaccaatcgatgcccagcgctggcgctggcgcgatgtcggcctgcgcatggaactgccgaccccggcgctggccggcccgatccagctggccaacgcgggtgccgccatcgctgcgctgcgcgcgctggacaagccggtgccgcgtgcggcgtgggctgctggtgtcgcggcggcgcgcatctctggccgcctgcaggcgttcgagcgtgacggcgtgcaggtccgtgtcgatgtcgggcacaacccgcaggcggcgggccagctggcgcgcgcgctgaaggccgaagcgtcggccgggcgcaccctggcggtgtacgccgcgctgcaggacaaggacgcgttgggcgttgtgcaggcgctgcaggacgtggtcggcgagtggaccctggccggactggacggcccgcgcgggcagagtgctgcccagttgcaggcccgcctggccggtacggcggcggccaaggcccagcgcgctgatactgtcgagcaggcgctggcacaggtactggcccaggccgggcgcggtgaccgcgtactggtgttcggctccttccataccgccgctgccgcgctgcaatggttgcagggcgccgcctgatccgcgttcagccaatgccgacgccgtccggtccggcacccgtataatcgaccgcaacctccggacagttgccgcctcacgtggatacgcctctgaaacagcgtctgattggtgccatcgtgctggtggcgctggccgtgattttcctgccgatgctggtcaagggaccggcgccggacagcggtgtggcctcggtgccgatcgccgcgccggacgcaccggccgatggccagttcgaaacccgtgagctgccgctggttgctccggccggtggagccaccggcctgcagaccgggcaggccaagccgctgcaggagacggccgcgccggctacgccgccgaccgtggacacgtctccggcggttgccgccggcaacttcgccgtcacgtttggcgcctacggcagcaaggccgacgccgatgcggtgatcgcctacctgcagcgctcgcagctgccaggcttcgccgaaaccaccaccatcagcgggcgccaggcgtggcgtgtgcgtgtcgggccgtatgccgaccgtgcccaggccgaagccgcgcggctgcaggcggtcaagatccgcgccgatgtgaaggcagaagtcatcaccctggatgcggcggcaggcagcagtgcgacggttgccgccacgccggcgccgaccaccagcaccccggccgcggccaccacgccgtcggccaccagcaacccggtgcgcagcgaaagcctgctgccaagcacgccgacggcgaccaccaaaccagagccgcccaagccggcaccgaagtccgaggctccgaagccggacgccaagcccgagccgaagccggaggccgccgccagcaagccggcgcctgccacgccgacagcaccggcagccagtggcgtcggcttcgccgtgcagttgggcgcgttcggccaggccaacgatgccaacgcgctgcgcgacaaggtccgcgccgccggcttcagtgctttcgtcgagcaggtacgcactgaaaagggcacgctgcatcgcgtccgcgtcggaccggtggccaaccgcgctgacgccgagcagctgaaggcgcaggtcgccgccaaggtcggcgtggccggcatggtccgaccgcacccatgatccacgcgcaggcccgttgccagcgccgccgaaggagcggggcgccatgatcgacgtggtgctgctgatcgtgatcgccgcctcgaccctgctcgggatgctgcgtggctttgttggaatcgtcatcggcacgctgtcgtggctgctggccgcgtgggcggccttcgccttcggcaacgatgcggcacgctggtgggcggccccggccgcacccggcggcgagcatttcgttggcggctacctgggcgtgggcattggcgtgatgatcgtggtcgcggtgatcggcatggtcatcaaggcgatgatccatcgcagcatgctgaccagcctggaccggttgctgggcggcgtgctgggcgccgtgcgtggcggcctgatcgcggcgatcctggtgctgctggccggcttcaccccgctgaccgccgaaccctcctggaagcgctcggcggtccgcccggtgctgaacccggccgtggcctggatgaacgggaagctgccgcactggcaggtgcccggcgccgatctgctgcccaagaccttgccgaccgacatgctgtccccatctgcattgatggagctggggaagagcgcaggcgccgatctgggaaagccgggcgcggcaggcgataatggcatcctcaaccaggtagtggcgggcagcggatggctgcggcccgcgaaagcggaacagggcgacgcatacgatccggccgaagtgcgcccggacgccccagcactgccagacagtatcgagccgggcgatccggccaatgtcgaccgcaggcgcggcgaccaccgcggccaggtacggccaccttccttgtaactgggcacagcccagcggagacttcgcaccatgtgtggcatcgtcggaatcgtcggcaaccagaacgtcgccgggcagttgtatgacggcttgaccgttctccagcatcgcggccaggatgccgcgggcatcgccacggccaatggcagccgcctgcgggtgcagaaggccaccggcctggtccgcgatgtgttcgatgcacgcaccatgtctaccctggaaggcagcgtcggcatcgcccatgtgcgctacccgacggccggctcggaaggcatggacgaggcgcagccgttctacgtcaactcgccgtacggcatcgcgctggcccacaacggcaacctgatcaacaccgaggcgctgcgccagcaggtgttcgagcaggaccgccgcaacgtcaacaccgattcggacagcgaagtgctgttgaacgtgttcgcctatgagctggagcagcagcgccagctgagcccggaagccgcgatccgcgcggtggctggcgtgcaccgccgctgcaagggcggctacgcggtggtcagcgtggtgctgggcctgggcctggtggccttccgcgacccgcacggcatccgtccgctggtgctgggcaagcgcagccatgccgagggcgacgagtacatcgtggcctccgagtcggccgcgctggacgtgctgggcttccagcgggtgcgcgatgtgcagccgggcgaagccctggtgatcaccgcccgcggcgagctgttctcggaaatctgcgccgagcctgccgagcacaccccgtgcatcttcgagtacgtgtacttcgcgcgtccggattcgatgatcgacaacgtctcggtgcacaaggcgcgcatgcgcatgggcatcaagctgggcgagaagatcctgcgcctgcgcccggaccacgatatcgacaccatcatcccgatcccggatacctcgcgtgatgccgcgctggagatctccaacgtgcttggggtgaagtatcgcgaaggcttcatcaagaaccgctacatcggccgcaccttcatcatgccgggccagggcgaacgcgtgaagtcggtgcgccgcaagctcaacccgatccacctggagttccgcaaccgcgtggtgctgctggtggacgactcgatcgtgcgtggcaccaccagccagcagatcgtgcagatggcccgtgatgcgggcgcgcgcaaggtctacctggccagcgcggcaccgccggtgcgctacccgaacatctacggcatcgacatgccggcggccgaagagctggtcgcgcacaaccgcaccgtcgaagagatcgaggcccacctgggctgcgactggctgatctaccaggatctggaggacatggaagcggcggtgagcgagggcaacccggcgctgcgcaacttcgattcgtcctgcttcaacggccactacccgacgggtatcgagccgggctacttcgagcgcatccagcagctgcgttcggacgacgccaagcacaagcgccgcgcctgaggtccaggcgtggtcgatgtacccgacgttggtggcgacctgctgcgcgcggcgcagcagtgcctggccgaagccgacccgctgcgcaaggtcgcgttgacccaggcgtatgccgccgcgttccgtgccggccgcctgaaggtggctgccgatgcgccgccgccggaaccgatccgcatgcctggccggccggcacggctggtgctggtgcatccgcgcgaagtgccccggcgcgggctgggcggcgtggaaggacgcgccgccttcatccacgccatcgcccacatcgaactcaacgcgatcgacctggcttgggatgcggtgtaccgcttccgcggcctgccgccagcgttccatgccgactgggtcagctgtgccgacgacgaatcgcggcacttcatgctgctgcgcgagcgcctgcaggcgcttggccacgactacgccgatttccccgcgcacaacggcctgtgggaaatgtgcgaaaagaccgcgcatgacggcctggcgcgcatggccctggtaccgcgcgtgctggaagcgcgcggcctggacgtgacaccgggcatgatcgagaagctgcgcaatgtcggtgatggtgaaaccgccgacgtactggaagtgatcctgcgggaggaagtggcgcacgttgccgccggttcgcgctggtaccgctggtactgcgatcgcgccggcgtcgagccgcgtgcgcgcttcaaggcgctgctggtggaatacgccggcggctacctgcacgggccgttcaacatcgaagcgcgcctgctggccggcttcgacgccgacgagctcgccaacctggtcgaacaggccggttgaacaaaaggggacggaggggattaagtcgtttgtgccacaaacgacttaatcccctccgtcccctttttcatgcgttgggcagcaccacgcgcttgccatccacggtgggccggttgatgtagaacaggccgggaccgggccggtagggcagttcgctgacgccggcatcggcggcataggtcagggcggtgtcgcccagcgcgtcgaaattccagtgcgccgactgcatcaggtagcgtcggcgcagcagcgcctcctgggtctgggtcaacgcctgccctgccaccagccgccgtgcgatcggttgcagggccgacggcagttcccagccgggaacctcggcagcgctggcgcgccaggtcacgccggcatcgatggcatgctgctgcatcacctgcagcgcgatcaactggtagcgccagtcgatgcgccgccgcagtaccacggcggcagtcacgtacagcaccggggacagcagcacgctgcggctgccggcgcggcgctgctgctgccactggtgccagacatccacccacacttccttttcgtccacgcccagctgctgccgccagcgttcggcatcggcctgcgtttcagcgtaagccgtggtggcctgcagcatcgccagcgggggaatctggtagtcggcaacggcggggcggcgcagctgctggcgacgtgggcggctgagcagcttggggccttcctccagctggttgtagcctccgccgatgttggcgtgcacgccgggcaaagcgatctcggtgaacgccggtgccaccgtggtcagcggatagtgctggcgatgctcgtcgcgcgcggtcaactgcaccacgcgtgcagcgatgccactggacagggcaagctgcggttgttcgtcggcgcggccaccactgaccgcagccacggtatcgaacaggccgatgaatcgcagcaccggaagggcaggggcgaagtccggcgtacagaccaggccggacgactgcagcagttgccgccaacgcgtggtatcccagccctgcagctggttggcgatatcacgtgcggcggcagcgcctcgagagaacccgaacagatccagctgcacgcgacgcagcggttgccgccaacgcgtggacagttctgcaagcgcagccggcagcaccacctgcagcgcgcgctgcacctttgcgcggacgccgctggcgccgataccgaacgccagtccgatcaggtcgtcgtcggcgtcatcgcgggtaccgacaccttccacgtagatcgacagcgaaggcgtggccatcgcatcgcggcggctgtccgggtacagctgctgcaggcgtgcgatgttggtcaggccgttgtcgtagctgctggtcagccggctctggtaggtcgaatcatcatccgcacgcagctgcgccgggcgcggtcgcggctgctgtggtcgaccacgcgcgaggttgtgcgcgttgttgcgggtgccatcgaagaacaggccgatccgcagcaagccgacatcttcgtccgtgtcctgcgatggtgccatgtgcattccccgtcgtggctgcgtcacggtagcgcgaaagcggtgtattggcgaagtgtagtgacgcttttgacctgactgaacgcagatgcggtcgatcacaaatcctgactttcattccactcgcctattgaattcacacgagccgcgcaggccatatggccaaacccggcaaaccgggtcgtgctgcatccacgctgttcacatcattcaaggagcgacgcaatgttgtccagatcgattggcaaagcggcaggtggcctggtgttgggtttgtcggtggcggcggccgcgcatgcggcaccgttgttcgagccggtgacggtcatcagccgcgcatcggcaaacagtgagcccgcgctgggcaagctgctggccaccccgtccaccgcgacggtacaggaagtgcgcgttgatgcagccgcgactgcacagccgcagctggaattcgaactgctcggccagcgcgtgcaggccgtgcgcagcaaggttgaagcgctgcccgatggcggcagcatctggtatggccagttccgttcgccctcggacaagctgaccgcggccacctccaacggccaggacgaccccggcaattcgctgatcctggtgcgctcgggcgataccatcaccggctcgatccgcaaggatggaaagctgtaccgcctgcgcccgctgggcaaccgccacgtgcttgtggaagtggacgagtcgcggatgccggccgaccatccggccgattacaaccagctgccgaagatcccgatgggcaacaacgatcgcctcggcatcgcgcaggcgtcgtccggcacgccggccaccatccgcgtgctggtggtggcgaccaatgccgccgtcgccgcctatggcggcaacatgcagtcactggtgcagctggccgtggccgaatcgaaccagggctatgtcaacagcaacgtcggcatcaccatggaactggcccgctacgagaccaccagctacaccgaatcgggcagcttcgataccgacctggcgcgtttccgtggcaccagcgatggctacatggacagcatccacaccagccggaatacctacacggctgatgtgggcgtgctgctgatcaacaacaccgcctactgcggcctggcctcgggcatcggctcgacggcgtcgaccgcgttcgcggccgtgtactgggattgcgcgaccggctattactcgttcgcgcacgagatcggccatctgcagagtgcgcggcatgacatcgccaccgactcgagcacctcgccctatgcctatggccacggctaccgctacgagccggccaccggcaccggctggcgcacgatcatggcctacaactgcacccgcagctgcccgcgcctgaactactggtccaaccccaacatcagctacaacggcatcccgatgggcaacgccagcaccgccgacaaccagcgcgtgctggtcaacaccaaggccaccatcgcggccttccgctgacactgtccaggcgccgaccaaggccggcgtctacccgggcgcatgcacctgctctggtagatgccaaccttggttggcaccttgcgatccgttatttgcgcgcgagcgtatccagcgtccagccgttggcatccacgcgcagcaccgaaccctgttcgtaccagtcacccagcacgatgcgggtgcgctcgcgaccaccggcctgcagcgtgtggatcgccggccgatgggtatggccatggatcatggtgtccacgccatggcgcacgaaggtggcatcgacttcggcaggggccacgtcggtcaccgactcgaactgcgcacgatcgtcctgcttcatctcggactggcgcgcctggctggcttcgcgcgccttctgcgcgaacgcgatgcgtgcggccagcggctgcgacaggaactgcgcctggaataccgggtcgcgcgtctgtgcacggaactgctggtagggaatgtcatcggtgcacagcaggtcaccgtgctgcagcagcaccgcgcggccgtacagttcgatcatgcacgggtcgggcaggatgcgcaggccggcacggcgcgcgtagtcctcaccgagcaggaagtcgcggttgccgcggatgaagtacaccggcacgccgctgtcggacagcaccttcaacgcatcggccaccgtgtcggcggcgggcgagggcgtgtcgtcgccgatccaggcctcgaacaggtcgccgaggatgtacagcgcatcggcgccgggcgcctgctcgcgcaggaagcgcaggaacaggtcggtgatctccggacggctggggtccaggtgcaggtcggaaatgaacagcgtggtcatgcccgcattctaggccatcaatgatgatggtggcgccgccggtattgtgggggtcagatctcttttccgaaggaaaaggatctgaccccggggctataccggcagcggcagccaggtcaggctggccgaagccagcacgatggcgatggcggtggctgccagcacatcggaaggatagtgcaggcccaggaccacccgcgacagtgcaacgccacaggtgaacggcaccagcagcggcgccagccacgggtagtaggccagtgccacgatggtgaacgacaccgcatgcagggtgtgtccggaggggaaactgaactcgtccagcggcaccacccaggcgcggatgcgcaggtcggccgcgtagggccgcgggcgccgggtccagcgcttgaggaccttgtacagcagcagcgcggccaggcccgtggcggccatgtgcaccgaggcgcgcaggccgtcgaagccgtccagcaccaccagcgcggccatcagcacgtaccagaacacgccatcgccgagccggctgatgaccgcgaacaggcgacgcacgcggcgccgccggcagtagtggtttgcgcgccggcaccagcgtgcttcgcgcccggccagcagctcaagcggcgtagtgcgcatggccgttcctccgcgactgtgccagttcggccagcagtgcatcgaactcggccaccacctgttgtggatgcaggcgcttcatcgcgcgtgcggcattgccgcccagttcgcggcgctgcgcgtcatcggcggccagtcgcacggcggcatcgatgaactgatcgtcgctgtccacggctgcgccgttctcgccattgcgcaggtactcgcgcgcggcgccgtagtcgaaggccacggtggccacaccgctggccatgctttccagggtcacgttgccgaacgtctcgctgcggctggggaacaggaacagatcgccgctggcgaagtgccgggccagcgcatcgccgcgctggatgccacagaagatgaagtcggggttttcatgtgccagcttctcgcgggccgggccatctccgacccacacgaagcgtgccttgggccggatctgctgcagccggcggaatgccttcactgccaggccgaggttcttttcagcagcgatgcggccgacatagatcgccaccaggccgttgccatccacgccccattcctcgcgcagcgcgggatcgcgccgtcccggatcgaactgctggctgtccaccgcgcgggccagcaggcgcacgcgctcgaagccctgttcgccgaggaactgctgcagctcgcgggtcggcaccagggtggcatcggcctggttgtggaaacggcgcatccagcgcatggctgcggcctgcagccacgccacgccgtagtcgggcaggtactcgtcgaagcgggtgtggaagccgctggcgaccggaatgccgaggcggcgcgcagtgcgcagtgccgaccagccgagcggaccttcggtggcgatgtagaccgcatccgggcgttgtttctgccaatggcggcccagccggatcggcgccggcagtccgaaacgcaggccggggtagcggggcagggcggcgccgggaaccagcaaggtgccgggtgccgaatccagcgcttcgctggactggcgggggcggaccaggtcgatctcgtgcccggctgcgcgcagaccttgttccagcccctgcacggtgagggcgacgccgttcacttccggtggataggtctcggtgacgatggcatagcgcatggcgggcctccgggtttccggcatgctcgggcctggcgatgtagccgacatgaccgctttgcgaccatcagatgacggcggcgccagccaccgcatgaaggccggcgcccacaaaaaaaccacggccccgaagggccgtggttgtcgtgcttcacgtgacagcgcgatggatcagaagcgctgctggtacttcatgtagacgaagcggccgatatcgtagccaccgtagtacgagaaggccgagttcggcttggtgtacatgatcgggccggtcttctcgaacacgttgttggcaccgaccgagacggtggcatcccacggcagcgagtagcggaactgcacgtcgtggaaggtgaccgaaccacgctcgttgtagttgcgggcacccttgtaccacggggcgtacacgcccggatcggagcactcgtccggataggcgcggatgtccacgcactgctccttcacgccggagtagtaacgcgcggtccagctgacgccgaagttgcccaggtcccagcccagcaccaggttcgaacggacgcggaagttgctgccgatgccgttggagacggtcggcaccaccgtgctgtcgttggtcgagcggaactcgctcttgctgacataggtggtggcccagccggcgttgaacttgccgacgctggtatccaggcggtagttcaggtccaggtcgtagccttcggtttccatgaagccggcattgcggctgccgaactgcagggtatcgacgatgccggcggtcgggccggtcgacttgtcacgggtgaagcgctggcaacgtgcgtcgatgccctgctcgtagcagtcgatcaggatctgggtcgggctgtcggcaacgatggtgttgtcgatgcggatcttccaccagtccagcgaggcgttgaagttcttgatgaagctcggactccagaccaggcccagcgtcttgctggtcgaggtttccggggtcaggtccgggttggagccggacacgaacggcaccggcgtcgcgtcgaccgaggtggcgaccggctggttgccctggcgcaactggcggaacgtcgcggcgttggcaatgtcacgggcgcagcgggcacgcacctcggcgctggtgcgcgaggagccgaactgcacgtcgcacggatcgctgaactgggcgaaggtctgcgagccgccaccgtacagatcgctgatggtcggggcgcggaagccttcagcccaggtaccacggaccagcagctggtcgaacggcttccacttgaagccgaacttgctgttgagcgtgttgccgaaggtgtcgtagtccgagaagcgggtggcgccgttgaaggtcagttccttggcacccggcaggtccgccagcaccggcacgttgatttccaggtacgcctcgttgaccttgtagccgccaccggtcgggcctgcggccaggttggtggtggcgccggcctgcgccagcggatccggacggtactcaccggtctccttgcggctttccacaccgaacgcgaagcccaggtcgccggccggcagggtcacgatggaaccggcgatgttggcgaagaagttcttgctggtggtcttgccggtggtgacttccggcgggaacagccaggcctgcaggtcggcgttgccatcgatgccgttcggatcgatcgtgccgtacggcaccagcgggttccacggcttgcacacgtcatgggagatcggcgcggcagcggtgccgcactggaccttgccggtggccgcattgtagaacgacgggccgacgccgccggcgacgcgcgccttgtgcaggttgccggtggcaatggtttccagctcgttgcggttgtactggtagcccgcttcccaatcgaagtagcggctgccgatctcgaacgaaccgtcgaacgacgccactgcgcggtaggtcttcagctcgctggtggtcacgcgcggcacttcccaggtgcggcggttccaggccacggcggtcggggtggcgtagccgtgctggcggccgaacgggttgaagtagctgtcgatcgacatcgagcccacgccagcggtgctggactgcagcgggtagccggcgatctggcgcacggccttgcgcttgttgtagcccagctcggtgcggaagttgacgttgtcggtgatcttgaagcggccgtcgaagtacaccgaatcgcgcttgagcgggaagttcaggtgcatctgctcgttggcgttgctgacgtcgccggtgaacgccgacggatcggtgatgtggtagttggccgggttggtcgggtcagcaccgcggttgagcgagtagttgcagccgctggcagtggtgcagcccgggcgacccttcaggccggtgaactggccccactggctgatggtggtccagttggtcaggttgtcggcatggcggtcggtcaggccgtacgcgctgaagccacggtccttggcccacaccgccttctcttcggcatgttcggccgcgacggtcagcgagatgcggtcattgctccagcccgccaccacgtcgaagcggtcacgcgcgccgtcgccctggctgaactggccgtggtagacgttggcggtcacaccggtgacattggaacgggtgatgatgttcaccacgccggacatggcatcggaaccgtagatggccgacgcgccgtccttcagcacttcgatgcgctccaccgccgagaccggaatcgtggagatgtcctggtaaccggaggtgctgatgcccaggcgcttgccgttgatcagcaccagcgtgcgctgggtgcccaggttgcgcatgtcgatatacgaaccacccgcgttctcaccggcggtcagcgcgttggcgcggctgatcgccgggctgcccatcgcagtgacgttctgcaggatgtcggctaccgagctgaagccctgctgctcgatggccgtacgggtgatcgcgaacaccggctgggcggtttccacgtccacctggcggatgcgcgagccggtgatctcgatgcggtcgaggttggtgggagtggcgctgctgccgtcctgggcaaacgcgggcacggcggccagcgctgcggtggtagccagggcgtagcggatggcctgccccagtgcggtggtgcgtgaagtcatggcgagctctctctctcaggtcgtgcaaaggacgccaaagtgggcgtcgaaggagccagcagggtcgatgaccgagccggtgacccgatagtagtctcgttagttaatgctctgtaaagggttcgtatccatttatgtcacagcggaccgccgtccttcacaaaacgtgaacaaaagcaggcgcttacgtgatggtcgggacgccccgtaccccgccgctgtgttgcgaagcagcacaaaaaaccgccagactgcgcaaagtgggggtgcgaagtgcgtcactcctgctgtcctgtggacaacaggcgacggcgtattcaggctacgaacggacgaaactggatgcccagcccggcgatcccgtcggtctcgccgatcaggtcggcgcgcagcagcggacgggcatcgatgaacgcctgcggcacgatcagcgacagccggttgtcgtcggcggtcagttccagcgccggcagcgggtcgtcctcatgcgcgcggttgagcagcaccgccagccgcagcagggccgccaaccggcgcgcggtcagcagcaggcgttcgggcagggcgtcgaaggcggtcttggtcacgctgcggcgatggctgcgcaccagcgcggccagcatctgttgttcctggcgggagaagccggcgatgtccgagtgctccagcacgtagctgccatgcacgtggtagccgctgtgggcaatcatcaggcccagttcgtgcaggcgtgcggcccagccgagcatgcgcgcatcatcggcatcgagcttccagcgttcctgcacctgctccagcagtgacagagcggtgtcctgcacgcggtcggcctgtaccgtatcgataccgtagcgctggctgagcgcggccaccgattcatcgcgcaggtcgttctcgccggcacggccgacgatgtcgtagaggatgccctcgcgcatcgcggccttgctgaccagcagcttctgcaggccaagtgcctggaacgccgcttccagcaccaggatgccgccggcgatgatcgggcggcggtcgctggacaggcccggcaactggatgtcgtcgatcttcttggccttcagcagctcatcgcgcagttgcggcagggcctcggcggtgatcgcgcccttgctcagcttcatcgtcgcgcagatctcgctgatcgccttgtgcgtgcccgaagaacccagcgcctcctgccagcccagcgcgcggtacttgctggcgaagggctggaactcgcggccgatctcggccagcgcgtccttccagcgcttcttgctgagcttgccgccggggaagaagcgccgggtgctggcgatgcaaccggcctgcaggctttcgcgctccagggtctgcatgcccatgccgatgatgaattcagtggagccgccaccgatgtcgatcaccagccggcgctggccgggcttggggggttgcgcgtgggccacgcccaggtagatcaggcgggcttcttcgcggccgctgaccacttcgatggcgtgtcccagtgcagtttcggccgggaccaggaacgactggggagaacgcagctggcgcaccgtgttggtggccagcgcgcgcacccgatgcggcggcacattgcggatgcgctggccgaaacgggccaggcattccagcgcgcgctgccgtgcggcggaagacagtccgcctttgccatccagcccgtcggccatgcgcaccgtctcgcgcaggcggtcgatcacccgcagctggccgagcgtgtagcgcgcgatgaccatgtggaaactgttggagccaaggtcgatggcggccagcaggtcgccatcctgcaatgcgggcggagtcgtggaggtatgcggcatgggcgaatgttagccgaagcggcggtgtgctcgtcaccgcgcggccttcacattctggaaggaggcgtgcagcaggattgcaaggggtcagatccctttcccgcaggaaagggatctgaccccgggcgaccgctgatcgaatcccgaccagcggtcgggatccaccggggcaggactacagcccctgcatcaatgccatctgcgcagaatgcggggcttcgtcgtgcgccggcgcacgcttgtggtagacgccgtcggcgtccagttcccaggcgttgaggttgtcgtccaggtagttctgcaggacctcgcggtacacccgcttggccagttccggatcgaggatcgggaagcaggtctcgacccggcgcagcaggttgcgttccagccagtcggcgctggcgcagtacatctccggcgcgccgtcgttgccgaaccagtagacgcggctgtgctccaggaagcggccgacgatcgagcgcacgcggatgttgtccgagacacccggaacgcccggacgcagggtgcaggcgccacggatgatcaggtcgatctgcacgccggcctgcgacgcggcgtacagcgcgcgcactacctgcggttcgttcaacgcgttcatcttggcgatgatccgcgctgggcggccggcggcggcgatgcgcgtctcgcgctcgatacggccgaggatgccggtgtgcagggtgaagggcgactgcagcaggcgcttgagcttcatcttcgaggccagcccggacagctgctggaacaacaggtgcacgtcattgccgatgtccggatcggcggtgatcaggctgatgtcggtgtacgcgcgggcagtgccgctgtggtagttgccggtgcccaggtgcacgtagcggcgcagcttgcggccttcgcggcgcacgatcagcagcatcttggcgtgggtcttgtagccgaccacgccgtacaccacctgcaccccggcctcctgcaggcgatcggccaggcccaggttggcctcttcgtcgaagcgcgcacgcagttcgaccactacagtcacgtccttgccgttgcgcgcggcctggatcagtgcgtcgacgatcagcgaatccttgccggtgcggtacagcgtctgcttgatcgccagcacgttgggatcgatcgccgcctgccggatcaggtccagcaccgcggtgaaggcatcgaacgggtggtgcagcagcaggtcctggcgcgccgtggtctcgaagatgccgtcgctgtcgcgcagcgtgcgcggggtcatcggcgggtacttcaggtctggctgcgcgatcaggtcgtacagctggatgatgcggttgaggttgaccgggccgtcgatgcggtacaccgcgttctcggtcaggccgaaattctgcagcagcgtgcgcacgatctcgcgcggcatgtcgtgggcgatctccaggcgcaccgccggccggtagccgcggtcgaccagttcgtcgcgcagcgccagcgccaggttctccacttcctcctcgtccaccaccagctcggagttgcgggtgacacggaactggtaggcaccctggacttccatgcccgggaacagctcatcgacgaaggtcgacagcaccgaggacaggaacacgaagttctgcgatccgccgagcttctccggcagctggatgatgcgcggcagcgagcgcggcgcacgcacgatcgccaggtggccggcgcggccgaacgcatcggtgcccttcagcaccaccacgatgttcagcgacttgttgaggatcttcgggaacgggtgcaccgggtccaggcccagcggcgacagcaccggcatgatctcgttgcggaagtaggcgcgcagccagcgcctctggcggtcggtccaggaatggcgaccgagcacgccgatgccggcctccatcagcgccgggcgcagcgtctcgttccagcagcggtactgctggtccaccagctccgcagcgcggtcatggatggcgttgaggatggcctgcgggctcatgccgtccggcgccggcggcaggccgaattcctgcgcgtggcgcacggcggcggcacggatctcgaagaactcgtcgaggttggtgcaggaaatgcacatgaagcgcaggcgctccagcagcggcacctgcgggtccatggcctgcgccagcacgcggaagttgaaatccagctgcgacagctcgcggttgatgtacagcgacgggtcgcgcaacggatcgttgtccgggctcacggggagggggagggatccgaggctgctcatggcgtcattcttcgatggaggtcaagggggcggactcgcgcgggcgcacgtggtcggcatcgaaatggcaggagaacaccgagcccttgccgacttcgctttcaatctccagccgtgcgtggtgcaggccgaggatgtgcttgacgatggacaggcccagcccggtgccgccgctctcgcgcgagcggctgctggacacacggtagaaacgttcggtcaggcgcggcaggtgggtggcgggaatgccgtagccggaatcgcgcaccgccagcacggcgccgtcgccttcgcggcggaactccaccgcaatgcggcccccggccggggtatagcgcaccgcgttggtgaccaggttggagaaggcactgtgcagttccttggtcgaaccctgcaggtcgacaccggccagatcatcgatgctgatctggtggcggccctggctgtgcgcctcggcctcgcggcgcagggtcgccagcatcggctgcatggccacggtctcttcctcgctgtgctcctgcgattccagccgcgacagggtcagcaagtcttccaccagctgggccatgcgctggctctgcttgcgcatttcttccagcatcgggccggtgccggggaagtcctccggatccatcatgtccaggtagccgtggaccacggtgagcggcgtgcgcagctcgtgtgaaacattggccacgaagtcgcggcgcacctgttccaggcgcagcagcttgctgacgtcgcgggcgatcagcagccagtaatccgacgaatagggaatcaggcgcaggttcaggcggatcgccggatcgaccggcgagggcacgtccaggatcggttcggcattgcggccaccggccagccagtgggccagcggcatcggctgcaggcgttcgaccagggcctcgccaaggtcgccgggatggtgcaggccgagcagggcggtggccgcttcgttgaaccactgcacgcgctggctgttgcggtccagcaccaccaccgcgtcgggcaatgcggcggcggcggcgcggtagctgcgcagcatgtccagcaggcggcgcttgcgcacgcgcatttccacctggttgcgatacagcaggcggtccagttcgttccagacgccggtgccttcttcggcggtgtcccagcgctggcgcgcggtcagccgccgcagcacgctgcgcagtcgccagtaatgccaggccagggtagccagcgcgcccagtgcgatgcacaaccacagatggcccgtgaaccaccccaccagtccggcgaacagcagtaccgcggcaacggtggccagggtcttcaaccaggcagagcggatgtggcggggcattgcggtctcgtcgttgaggtgcggcggttcactggagtgaaccaagggttatagcagagttgccggcaccggcacccgcaggtgcgcggtgccggcacgacgagactcaggtggcagtggagaaccggtagccggcgccgcgcacggtctgcaccatgttctcggcgttgaacggttccagcgtcttgcgcaggcggcggatatgcacgtcgatggtgcgctcctccacgtacacgctgccaccccatacatggtccagcagctgcgcgcgggtgtagacgcgctccggatgggtcatgaagaagtgcagcaggcggtattcggtcgggccgatcggcaccggctggtcgttggcgaacacgcgatgggcggcgccgtcgatgcggatcgggccgactgccacgctgccgtcctcgtcgtcctcgcgggcacggcgcatcaccgcacggatgcgcgccagcagttcgcgcgccgagaacggcttgaccacgtagtcgtcgacgccggcttccaggccaccgacgcggtcgttctcctcgccgcgggcggtcagcatgatgatcggcacttcgcgggtcagcgtttccttgcgccagcgacgggccaggtccaggccgctggtgccgggcagcatccagtccagcaggatcaggtccggaacgcggtcggcgatcgcggtctgggcctcccgggcatcgccggcgtggaccggttcgtaatcgcccttgcgaagggcgaaggcgaccatttcacggatcgcgggctcgtcatcgacgatcaggatgcgtttctgcacgaggacaccgtagggctcggttactggagtggtgccagtagactacggtttgatgacatgtttgtgactgcccggccggaaccggcctggattgccatcggccggtcatgcagcgctcagcgccggtccaggtccgggtcctgcacgccctggcggcgcagctccagcacggtcggggtgatcgcttcgatgcgggcatcgacccgcgcgcggccaatgtaatccagcgccgggttgcgcttgagcgcctgcagctgcagcagcgcctgttccggccgaccgctgaggaaggcggcctcggcataggcctcgctggcacgcacgctgtcgccggccagctcgctggcgcgggcaaagcgctgctggaagaccggatcgttaccgctttgcgacaacagggggcgcagcatcgcctgcgcgcgctggccggcctcgcggttgccctgttcgttcaggatctcggcataggtcagtgccaccgggcggctgttggggtgttcgcgcagcagctgctcgaagcggctgttggcctgggccgcctggcctgcccgcgattccgcttcgcccaggcccagcgccagccacaggttgccgggatgggtctggagcaggccggccagggtctgccgggcctggccggcgccggcacggccaccgcgcatgaccgccagcgcctggccatagcgctgcgcatcgttgagaccgtccttctgccgcttggccaggtcggcatactcgcgttccagctcgggggtggaatccgcgctgagcacgcgcaggcgctcacgtgcccagtcgaagtcgccgctggcgccacggttgagctggccgatcgggaggcgcagcacactgctgggcagcagcgggttgttgccgcgcagcagcggctcgcccaggctgggatcggccgggtccacccgctccttgcgctcgccggtgggggtgctggtggtcagcagcaccgtatccttcttcatctgctcggcgcgggccttggcttcgctgatgcgggtgatgttgaccgggtgggtgcgcaggaactcgggcacgctgtagcccccttcgttgccacgcatggccgccgacatccgttcgaagaagccggccatggcatccacgtcgtagccgctgcgtgacagggtgcggatgccgaggcggtcggcctcggactcgttggagcgggtgtagttgatctgccgttgctgcatcaggcccatgcccgagctgatcgcggccatcgtcgcgttgccggacgacgtgctgttgctggcctgggcggccaccaccgctgccagcatgcccagcaggatcgggatctggtcacgctgggcgcgctcgacgccgcgcagcacatgctgctgggtgacgtgggcgatttcgtgggacagcaccgcagcgacctcgtcctcgcgctcggcggtcagcaccaggccggcattgaccccgatgtagccgcccagcgtggcgaacgcgttgatctggcggtcgttcatcacgaagaaggtgtacggctgccgcggctggtcactgttggagccgagccgggtgcccatggtctgcagccagtcgttgaccagcggatcttccagcaggtagccgtagttgcgcagctcgcgcagcatcatcgcgccgtactcggcctggcgggccggggtcagcagctcgccggccgaggagccgatgtcgggcagcttctcctgggcctgggccagcggcatggccagggccagggtgacggcggtagtcagcagcagggctcgcaagcaggagttcctcgggcggggcgcgccaagcgtggcagggcggggggcaaccattcgttaatccacagtgttgcggccgtggcgtggaaattccagcgcaccggtaccatatgtagaccgtcgatccatcgtggagtttcccgtgacagcccagaccgccggcggtgcccccgccatcaccatctattccaccgccgtctgcccgtactgcgtggccgccaagaacttcctgaagagcaagggccagcagtggaccgaggtccgcatcgacctggacccggccgagcgcgagaagatgatggcgctgacccgccgcaccagcgtgccgcagatcttcgtcggcgacgtccatgtcggcggctacgacgacatgatggccctgcaccgtgaaggcaagctcgagccgctgctggccgggcagggccaggcatgagcgcggccgacgacggcagcaaggaccgcatcgccgagttcaccgagttccgcaagcgcatgaacgagcggatcctgggtgagccgaaccaggtggtgcgccgcttcttcgcgctggacacgcagacctaccaggccggcgcgctggacgtgaagaccaaggagctgctgggcctggtggcctcgatggtgctgcgctgcgacgactgcatcagctatcacgtggcccagtgcaaggacgccggcgtgacccgcgaggagttcttcgagaccttctcggtcggcctggtggtgggcggatcgatcgtgatcccgcacctgcgccgcgcggtcgacttcctcgaccagcttgaaggtggcgccgccgccccggcagcgcacgagcactgaggggcgtgccggccgctggccggtattccctgaatccggcatggccggggttgccggccagcggccggcactaccgcacccgcgaggggccttcccacgatccaacagcccaggagcccccttgttgttcaagggggcgcgccgacaggcgcggggataaggcggaatgcgcgggcaattctgcctgggccgggcactgggaccatggtctatttgggacctcggccccggctcaggcataattgccggtgaaacttcctttgcgccggcgtttccgggcacgtccggacggcgtttttccccctgttcggaacatcgatcaatgacgcagaaaattacggtcatccgcggcgacggcattggcccggaaatcatggacgccaccctgttcgtgctcgaccagctcaagactggcctggagtacgaagacgccgacgccggcctggtggccctggaaaagcacggcgacctgatgccggcagtgaccctggaatcgatcgcgcgcaacaaggtcgcgctgaagagcccgttgaccaccccggtcggtggtggcttcacctcgatcaacgtcagcctgcgccgccacttcgacctgtacgccaacgtgcgtccggcccacaccttcccgaacaccaagtcgcgtttcgacaacgtcgacctgatcaccgtccgtgagaacaccgaaggtgcctacctggccgaaggccaggaagtgtcggccgacggcgaaaccgccttctccggcacccgcatcacccgcaagggctccgagcgcatcgtgcgctacgccttcgagctggccaagagcactggccgcaagaaggtcactgccgtgcacaaggccaacatcatcaagtcgacctcgggcctgttcctgaacgtcgcccgtgaagtcgccgcacagtacccggagatcgagttccaggaaatgatcgtcgacaactgctgcatgcagctggtgatgcgtccggaacagttcgatgtgatcgtcaccaccaacctgttcggcgacatcatctccgacctgtgcgccggtctcgtcggcggcctgggcctggccccgggtgccaacatcggcaaggacgcggcgatcttcgaagccgtgcacggcaccgcgccggacatcgccggccagggcaaggccaatccgtgcgcgctgctgctggcagccgcgcagatgctggaccatgtcggccagccggaaaacgccgagcgcctgcgcaaggccatcgtggcgaccatggaagccaaggattcgctgaccggcgacctgggcggcaccggcaccaccatgagctttgcccaggccatcgccagccgcctgtaagcggccggccgacctcggttggatccacagcggggcgccttcgggcgccccgttgcgttgtgggccggcccggtagatccacgccgtgcgtggaatgacggggccttggtccgcagccacccatggggtggctctacatggaaattgtctgtgcgtacattgcacagatcatgtgccgctacgcggctggttcgtgcgtcatgcgctccgcatcctgtgcccacttcccaacgcactggagctcgaacatgaacctcactgccttcggcctggccagcctgatcggcatggccaccaccgccccggtcgccgccgccgagccggcccatcccaccatccgccacatggctggcgcgccggtcgcgacctcgctggatgcggcaaagaccgccgtgctggtcatcgacttccagaatgagtacttcgatgccacggccgcaccgggctttgccggtggccgcatggtcattcccgatggcgtggccgcgctgcggcaggcgaagcgggtggtcgaattcgccgatgctcatggcatccgcgtgatccatgtgcagcacgtgctgccggcgggtgcgccgctgttcgcacagggcagcgtcaatgctgccttccatcgcgacctgcagccgcgccagggcgagaccgtggtgcagaaggacaatgtcagcgtgttcgccggcgcgtcctccaccgtgctcgacccgctgctgaagaacgccggcatcgacaccctgatcgtcaccggcctgcagacccatgcctgcgtggctggtgccgcgcgcgacgcggcggccgcaccccgtggttaccgggtgatcgtctcgtccgatgccagcgccagccgtgacctggacctggctggcggccggcgcatcggccatcgcacgctgcatgaagccgctctggcccagatcgaggacgccttcggcgatgtcatgacgactgacgcgatcctggcactgccggtgcgcaaggccggcgacggcgcttgataagctggcggggcccgcatgccgcgggctccgccacgtggagctgcccgccgatggatcacttcgctgccctgcgtgcactgcgcgccatcgtcgatgcgggcagcttcaccgcggcagccgagcgcctcggtaccacccactcggcgatgtcgcggcaactgcggcagctggaagaacacctgcaggtgcgcctgctcgatcgcaacagccgccggctgtcgttgaccgaggccgggcgcgactactaccgtgaggcggcaacgctgctggaccgcctgcaggaagccgacgaccgtgcccgtgccgggcaggcgcagcccagtggaagcgtgcggatcagcgtgccgcaggtggtggccagccaggagctgccgcactggctgccgtcattcctgcagcgttacccccaggtcacgctggacctgtcggccgatgaccagctggtcgatgtggtcggtggtggtttcgacctggccctgcgcatcgcggcttcactgccggacagccagctggtcgcgcgcgaattggccagctgtccgcgcatcctggtcgctgcaccggcctacctggcacaccacggactgccgcggcaggcagcggacctggctcatcacacgctgctgggtttcagtcccacgccagcactgccgccctggcagttgcaggggccgcgcggcgcaaccgcgagcatcgaagccgggcagcgcctgcgtgtggatgccacgcccgcactgtacgccgccgcgctggccggcatgggcatcagcctgttcaccgcgctgaccgtgcaggaggacctgcgggccggtcgtttgatccgcgtgctgccggcctggcatgccggccagcgacgctacttcgcgctgtatccgcatgcacgtgcactggcgcccaaggtgcgtgcgctggtcgagcacctcgcggcgcactacgctgcacaggtgagcgcggcagggaagtcgcgcagctgaaaccgaggtggtgatggagtcggtgtatctgctggtcgcgctcggcgcgatcgttgccggattcgtgcagggcctgtccggtttcgccttcgggatggtagcgatgtcgttctgggcatgggggctggagccgcgactggccgctgcgctgtcggtgttcggcgcgctggtcggtcagctggtggccgtgttcaccgtgcggcgtggcttcaacctgcgcctgctgctgccgttcgtgctgggcggcctggcgggcattccgctcggcgtgatggtactgccacacctggacatggactggttcaaggcgctgctgggcggcttccttgcgctgtggtgcccggtgatgctgatggcgcgatcgttgccgccgatccgcgtgggtggtcgtatcggtgacgcgatcgccggcatggcaggtggggtgctcagcggcatcggcggtttcgccggaccggtgccgacgctgtggagcacgctgcgtggcttcggcagggacgagcagcgcgcggtcatccagaacttcaacctggcgatgctggcagtgaccatggccacctatgtcggcagcggcctggtgagccggcagatgctgccgtacttcgccatcgtggcgccggcgatgctggtgccgaccctgctgggtgcgcgcgtctacatcggcatcagcgaggcgcgcttccggcagatcgtactgagcctgttgaccgcgtcgggcatcgcattgctggcgtcgtcgatgccggcgctgctggcgcggtcgtaaccggttgaacgtcaggtcgggcggaacatgcggaagcgctgtccggcaccgatgcggaagtagtcggcaggcccgccgccgcgcaggatcggggccgccgcagcggtgtcgtagatgccatcgaccagcagccgttcatcgatatgcaccgtcaccacttcgcccagcaccagccagccgttggtgtcctggccggcggcatcgcgcaggcggacgatctgcgtgcagcggcattccatgcttaccgggctctgtgccacgcggggcggtgtgacctgcgttgaggccagtggcgtcaggccggcaaggacgaactcgtcgacatccggcgcgaccgcacggcagctttcgttcatcgcctcggccaggtcgaaggtggccaggttccacacgaattcaccggtggcttcaatgttgcgcagcgagtctttgcggccctggctggagaagccgatgatcggcggggtgtagttgaaggcgttgaagaagctgtagggcgccaggttcaacgtgccctgtgcgtcgcggctggaaatccagccgatcgggcgcgggccgatgatggcgttgaacgggtcatgcggcagacggtggccctctgccgggcggtagctgtggaaggtgtcgggcatgggggcaggggacgtgtgggcttgctcgactctacaaaaaagccgcgacccttgcggatcgcggcttgtctctctcggcgtggctggactcagcgctgctggatcttcgacagcaggcgcaggaactccacatacagccagaccagggtcaccatcaggccgaatgcgccataccactccatgtacttcggcgcgcgctgggccacgccggtttcgatgaagtcgaagtccagcaccaggttcagcgccgccacgaccaccacgaacaggctgaaggcgatgcccagccagctggagtcgtggatcaccggcacgttgatgttgaagaagcccagcacgaacgaggccaggtagagcagggcgatgccgccggtggcggcgaccacgcccaacttgaagttctcggtggccttgatcacgccgctgcggtacgcgaacagcagcgcaaacagggtgccgaaggtcagcagcacggcctggaacacgatgcccgggaacttggcgttgaacagggccgagatggcgccgaggaacacgccttccaccagcgcatacatcggcgcggtgaccggcgaccattccttcttgaagatggtgatcagcgccagcaccaggccgccgatggcgccgcccatggcatacaacctggctccggccatgacctggccgtagtcgtcgatggtctggttccaggcgaaagcggccgtcagcacggtcaacagcagcaggaaaccggtcttgttgacggtgccgttgagggtcattgcctggtcggggctggtcaccaccgaaccgctggcgaggtcgaggaaggtcgactcggaaagagccgggttgccgctgcgcatgcgtgttctccgtgcgaatgagggtcaggacggccatccggccgatgggcgtgagcatagccgatgactgctttcggcgttgtggcaggccgcggaactgcgcgtccttcgttgacagttcccaacgcgcttggcgacaatgaccaactccccgggcctgacccgaggggattgcaagaccggggtatagcgcagtctggtagcgcgcctgctttgggagcaggatgtcgggggttcgaatccctctaccccgaccaatcccacgtcacgtcggattggacaccgttccggttcgggcgcccgtagctcaactggatagagcaccggccttctaagccggcggttacaggttcgattcctgtcgggcgcgccattggcgggacagcgggatcgcatcggcggatgtgaagaagtgcttgcaaaagcgtaaagactccaccagaatatcggactcgcttcggcggaccggaacttcggtgacagtctccaggcaaggtttcaaggttccagtgctggcggtatcggcggtggagcgaaagtttcagtggtggctgtagctcagttggttagagtaccggattgtgattccggtggtcgggggttcgaatcccctcagccaccccactgattcaaccgcatcggcgcagccgaaacggtattgcaataaacagaaagcacgttacaatgtgcgtctgagtttcacgggccgttagctcagttggtagagcagttgactcttaatcaataggtccaaggttcgaatccttgacggcccaccaagacggaagccacctggtacgctaggtggcttttttcttataggtgtgaccctttcgtttcaatgggccacacgttgcagggccccgcctggcgtggatctgcagcgcatcgggatcgcagtgctggtttcaacgatgttgaagaaagtgcttgcacccaccgagcggatcgggtcataattcgcgccccgatttcgggctgttagctcagttggtagagcagttgactcttaatcaataggtccaaggttcgaatccttgacagcccaccagacgaaagccacttggtcatccaggtggcttttttcttgcccgcacgccgggttgcgcttcatccacgcatggcgtggatccactgaagcagtgctgaaatcaggggcatacgcgtcatcagtgctttcaatgctgtgcactgcttctcaccgcatggcgtcctgcatcgcacccaatagatcttccgcgccgatggcgcatgcaggaaggaagatgttgatggctgagatcactcgattgcacggcacggtgtgggttcccttcgcgttgatggcactggcggcctgcacgccgggcaatgatcccgcgcaggctgtcgagcgtgatgcgggcgcagagcgcattccggcgcgccagatcgacgacgccatgcagttgcggccggcccggcccgcggagggggaggtcctgcccggcgcggtggacgtacagcgcaatgcggacggttcggtggatgtgcgcagggctgcgccggcgtcggtggccctgcgtcgcaccgacgatgggggcgtggaggtccggaaggtggatgcggccgtcgacccgggctcaggcgcggcgccggcccgcacggtaccgcagcagtaggctgcggccagcccggcggtcgcgcacccgccgggctggccgcgatgcagcgatggcgcggagcgtagtggattcagctttgtgcaggccttccgattccagtcgccgcctgcgacaatgaacacctgtgccggccacgcgaaagtggcggaattggtagacgccctggatttaggttccagtgccgcaaggcgtgggggttcgagtcccccctttcgcaccagtgccggcctgtccccgccctgatcgggccatcggcgcccccttgaccggcacgcgctggcagtgcaggccgaattgggcgaaactaaagggctgcggcaagcaggcgcgtcccagacgtcgtgtcctaacaaccgtttcatcccaatcatcgagccgggggcctgggccaccggtggcaggagtcaacatgcaagcttcgatcgaatccaccggcaacctggaacgccgcctgagcttctcgctgccggaagagcgtctgcagagccacatcgccggccgcctgggcgaaatcgcccgtaccacccgcatcaaggggttccgtccgggcaaggtgccggccaaggtgatcgagcagcgcttcggcgcgcaggtccgtggcgaggcgctggacggcctgctgcgcgagaccttcgacgcggccgtgcgcgagcacgacctgcgcgtcgtcggcagcccgcgcatcgacaagggcgacgagggtgagttctccttcgtggccaccgtggaagtggtgccggacttcggcgacatcgacgtcagcaagctgaccgtcgtgcgccacaccgccgagatcaccgacgccgacatcgaccagatgatcgagaacctgcagaaccagcgtcgcacctgggccccggtcagccgtggcgcgcaggacggcgacctggtcgcggtggaaacctggtcgcaggccggcgaagagcgcctgccggccgagggcaccgagaagggttcgatcgtgctcggccagggcatgatgttcgacaccatcgaaaagggcctggtcggcctggccaagggcgaagagaagaccctggacgtcgagttcccggctgactggcgcgtgccggtgctggccggcaagaccgtgcaggtcaccgtcaaggttgccgacgtgtccgagccggtcgtgccggcggtcgacgaagccttcatcaagagcttcggcgtgaagggtggcgacgtcgagcagttccgcagcgacatccgcgccaacctggagcgtgagctgaagggcgcgctgatgaaccgcctgcgccgcgaagtgggcgagcagctgatcgcggcctactcgtcggtggaaatgccgccgcgcctggtcgagaacgaagcccgcgccatgctggcccagcaggtcgagcagctgcgccgcaacggccagaacgtcggcgagatcccggccgatgcccacgaaggcttcaaggacgccgccgccaagcgcgtgctggtcggcctgctggtcggtgaagtggcccgcatcaacgacctgcgcctggaagccaagcgcctgaacgaaacgatgcgtctgatcgcctcgacctacgaagagccggagcaggtcattgagatgtaccgcaacgacccccagctgatgtctggcctgcagaaccgtgtgatggaagagcaggtgatcgactggatcgccgagcgtgcccagcacaccgaagagaagctgtcgttccaggacgcgattcgccagtaagccggcggatcaccggatgccccgcgcctttgccggcgcggggttgttgccccccaagataggtacctcacgtaatggacaaccgaaccaaagccctgaacctggttccgatggtggtcgagcagaccagccgcggcgagcgtgcctacgacatctattcgcgcctgttgaaggagcgcctgatcttcctcgtgggcccgatcgacgatcacatggccaacgtggtggtggcgcagttgctgttcctggaatcggagaacccggaaaaggacatcaacatctacatcaactcgccgggtggcgtggtcaccgccggcatggcgatctacgacaccatgcagtacatcaagccgaatgtgagcaccacctgcatcggccaggccgcctcgatgggcgccctgctgctggccgcgggcgaagccggcaagcgctatgcgctgccgaactcgcgcgtgatgatccaccagccgctgggcggctaccagggccaggccaccgacatcgacatccacgcgcgtgagatcctgaccctgcgttcgcgcctgaacgagatcctggccaagcacaccggccagtcgctggagacgatcgcccgcgacaccgagcgcgacaacttcaaaagcgccttcgaggcgcaggcctacggtctggtcgaccaggtcctggagcgtcgtccggatgagtcgatccaggccggttgaccggccttcacggggccagggaggccccgttcctgcagggtcgggcgggactggtgtcccctcggccctgtgctattctcgaatcgaacccccgttcagcgggtggggtaactgggtaagcgaagcatgagcgaagaccgccaaggtcgttccacggacaccggcaagatcctctactgctctttctgcggcaagagccagcatgaagtgcgcaagctgattgcgggtccgagcgtattcatctgcgatgagtgcgtggagctgtgcaacgacatcatccgtgaggaacttgaggaaaaggcgcagtcggcgcgcagttcgctgcccaagccgcgcgagatcctcgaggtcctggaccagtacgtgatcggccagaaccgcgccaagcgcaccctggccgtggccgtgtacaaccactacaagcgcatcgagagccggcagaagaacgacgacgtcgaactggcgaagtcgaacatcctgctggtcggcccgaccggttcgggcaagacgctgctggccgaaaccctggcccgcctgctcaacgtgccgttcaccatggccgacgccaccacgctgaccgaagccggttacgtgggcgaggacgtggagaacatcatccagaagctgctgcagaagtgcgactacgacgtcgagaaggcacagcagggcatcgtctacatcgatgaaatcgacaagatctcgcgcaagagcgagaacccgtcgatcacccgcgatgtgtccggcgaaggcgtgcagcaggccctgctgaagctgatcgaaggcaccgtggccagcgttccgccgcagggcgggcgcaagcatccgcagcaggaattcctgcaggtggacaccaagaacatcctgttcatctgcggcggcgcgttcgccgggctggacaaggtgatccaggcccgttccaccgacgtcggcagcatcggcttcggcgccaaggtgaagagcagcgagcgcaagcaggaagtgggcaaggtgctggccgaagtcgagccggaagacctgatcaagttcggcctgattccggagttcgtcggccgcctgccggtggtggcgaccctggaggagctggacgagccggccctgatcaagatcctgaccgagccgaagaacgccatcaccaagcagttcaagaagctgttcgagatggagaacgtcgagctggagttccgtccggacgcgttgtcggccatcgccaggaaggcgctcaagcgcaagaccggtgcccgtggcctgcgcaccatcgtcgaatcggtcctgctggacaccatgtacgacctgccgtcgcaggaaaacgtcagcaaggtggtggtggacgaatcggtgatcgagcacaagtccgagccgtacctgatctaccagaccccggcggtccctgaacagaaggccgcaggcgccgagtgatccttccaggttgttgattggaaaggattttcaaggaatgccttgcatctgaaagccgatggccccataacggggccatcggctttttttgtctccggaagatgccctcccggaggcggttttcccccttccctggagcccccatggcccgttccccaagtgaaaccctcgacctgccggtcctgccgctgcgcgacgtagtggtgttcccgcacatggtcattccgctgttcgtcggccgtgacaagtccatgcacgcgctcgaacaggcaatggaggcggacaagcgcatcctgctgctggcgcagaagtcggccgaaaccgacgacccgcatgcggccgacctctaccaggtcggtacgctggcgcaggtgctgcagctgctgaagctgcccgacggcaccatcaaggtgctggtcgaaggcctgtcgcgcgtgcaggtcacccacgttgacgagcgcaacggctcgctgcacggccaggccgtggagatcgacgccagcgacgagcgcgaagcgcgcgaggtcgaggcgatcgcccgctcgctgatgtcgctgttcgagcagtacgtgaagaccaaccgcaagctgccgccggaactgctgcagacgctgtcgggcatcgatgagccggcgcgcctggccgacaccatcgccgcgcacatcagcgtgcgcctggccgacaagcagcgcctgctggaaacgctggccgtcggtgatcgcctggagatgctggtcggcctggtcgacggcgagatcgacgtccagcagatggagaagcgcatccgcggccgcgtgaagtcgcagatggagaagagccagcgcgagtactacctcaacgaacagatgaaggccatccagaaggaactgggtgacctggacgatgcgcctggcgagctggaagagctggcgcgcaagatcgccgaggccggcatgccgaaggccgttgaagccaaggcgcgcaacgagctgaacaagctcaagcagatgtcgccgatgtcggccgaagcggcggtcgtgcgcaattacctggagtggttgctgggcgtgccgtggaagaagcgcagcaaggttcgcaaggacctgaaggtggcgcaggacaccctcgatgccgatcactacgggctggagaaggtcaaggaacgcatccttgaatacctggcggtgcagtcgcgcgtgaagcagatgaagggcccgatcctgtgcctggtcgggccgccgggcgtgggcaagacctcgctgggacagtccatcgccaaggccaccaaccgcaagttcgtgcgcatgtcgctgggcggcgtgcgtgacgaggccgagatccgtggccaccgtcgcacttacgtcggttcgatgccgggccgcatcgtgcagaacctcaacaaggtcggcagcaagaacccgctgttcgtgctcgacgagatcgacaagatgtcgatggacttccgcggcgatccgtcctcggcgttgctggaagtgctcgaccctgagcagaacaacgcgttcaacgaccactatctggaagtggacctggacctgtctgaagtgatgttcgtggccacctcgaactcgctcaacattcccggcccgctgctggaccgcatggaagtgatccgcatccccggctacaccgaggatgagaagctcaacatcgccacccgttatctggtgcccaagcaggtcaaggccaacggcctgcagccggaagagctggagatcggcagtgacgccatccaggacatcgtgcgctactacacgcgcgagtcgggcgtgcgcaacctggaacgcgagatcgccaagatctgccgcaaggtggtgaaggagatcgcgctggccggcccgcagccggtgaaggcgaagaagggcgcgaagaagaaggcgctggtgagcgtgtccagcaagaacctggacaagtacctgggcgtgcgtcgcttcgacttcggccgtgccgaggaagagaacgagatcggcctggtcaccggcctggcctggaccgaggtgggtggcgatctgctgcagatcgaatcgacgctggtgccgggcaagggccagctgatcctgaccggccagctcggcaacgtgatgaaggaatcggcttcagcggcgctgtcggtggtgcgttcgcgcgccgtcggcttcggcatcgacagcgacttcctgcagaagcacgacgtgcacctgcatgtgcccgatggcgctacgccgaaggacggcccgagtgccggcgcggcgatggtcacctcgctggtatcgatgctgaccaaggtgccggtgcgtgccgacgtggcgatgaccggcgagatcaccctgcgtggtcgcgtcacggccatcggtggactgaaggagaagctgctggccgcactgcgtggcggaatccgcacggtcatcattcccgaggagaaccgcaaggacctggccgacatcccggccaacgtcacccgcgatctggagatcgtgccggtgaagtacatcgaagaagtcctggacctggcgctggagcgtccgttggcaccgaagaaggcgcgcaagagtgcgcaacgtgtcacggtgcgcagcaaggccaaaccgagtggaaacgcgcgcgtcaagcattgacgcgcgctgtccaatggcccgaaacccgcgtcgttgctggctttccagcttgcgtgggggtagggccactggtataaaagcagcactcgcgaatgagtgatcgcagtctggcgatcgctgaattcggcgaaccgtttccacatggcggccgcatgcagagcgcgtgcggttgcttccctgtcgaataagcggaacccaccgccaaaggagttgtagagaatgaacaagaccgaattgatcgatgccgttgctgaagctgcagacctgaccaaggccgagtccagccgcgctgtcgatgccgtcgttgctgccgtcaccaaggcgctgaaggacggcgatgcggtcaccctggttggcttcggtaccttccaggtccgcgaccgtgctgcccgcaccggccgcaacccgaagaccggcgacaccatcaagatcgctgcttcgaagaatccgtcgttcaaggctggtaaggccctgaaggatgctgtaaactaagcggctcgctggggtgcttagctcagcggtagagcgtctcctttacacggagagggtcgggggttcgaaaccctcagcacccaccacagcaccgcggtaaaagtttgagtgtggagcggtagttcagctggttagaatgctggcctgtcacgccggaggtcgcgggttcgagtcccgtccgctccgccattcaacgaggcctccggccaaaagctggaggctttgttttctcccggtccaggccggctgaaagcaaaaaaggtaacaacgcggagcggtagttcagctggttagaatgctggcctgtcacgccggaggtcgcgggttcgagtcccgtccgctccgccactacatcgaggcccccggcctgaagctgggggccttgtcttctcaccgacaggttcggaaggaaggcgaaaaggtttttgcaagaacggagcggtagttcagctggttagaatgctggcctgtcacgccggaggtcgcgggttcgagtcccgtccgctccgccattgcagaattcttaagtccctgtgaaaaaactttgaaaaaagtgttcatcgggctgggtttccagacagtcttcggatatactgggcgcctgcaaagttcaagcgcggagcggtagttcagctggttagaatgctggcctgtcacgccggaggtcgcgggttcgagtcccgtccgctccgccaacttcaaaagccctcggcgcaagccgggggctttttctttgcgccatgatggaaatggccgacacgcggatggcgcatgcctgccgatgtgggcgcaggccgcgctggcgctgcttttggtccctgcggcgaagcgggttacactgccgggctcgccaataaggccttgtgattcctcaccatgctgcagaaactccgcgacaagacctcaggctggatcgtcactgtgatcctggggctgctgatgattccgttcctgttcgtgatcgacaacagctacctcggtggcgttggcgcacagaacgtggccaaggtttccgcgccgccgacctggtggcgttcggcgccgtcgtggtggccggtgcgcatgctgtggcagcaccacgagatcagctcgcaggatttccgcacgcgtttcgagcaggagcgcatgcgtgagcgccagcagcagggcgacaacttcgacccgcgcgcgttcgagagcaccgagaacaagatggccgtgctcgaccagctgatcgacgagcaggtcgtgcgcctggtcggtgagcaggcgggcgtggtgatcggcgacggcgcggtgcgcgagtacatcgcgaccatgcccgcattcctcgattcgaacggcaagttcaacgagaacaactatcgcctggccctggccggcggcaacccgccgcgtacgccgacccagttccaggagctggtgcgcgagagcctgcagcagtcggtgattccgtcgggcctgcagagctccggcttcgtcacccaggcagagaccgagcgcctgttgaagctgctgggcgaaacccgcgacgtcgagctggccgcgttgccgcccgtaccggccgataccgcgccggtcaccgatgagcagatcaagcagtggtacgacagccacggcaaggatttccgccaggccgagagcgtgtcgctggagtacgtcgagatcaacggcgcgaacctgccggcaccggcggcggccgatgaagccaccctgcgcaagcgctatgaagacgagaaggcgaagttcacctcgccggagcagcgccaggcctcgcacatcctgatcaccggtgacggtgcagaagccaaggcgaacaggatcgctgccgaagccaaggccgctggtgccgatttcggcgcgctggccaaggccaattcggaagatccgggctccaaggaccagggcggtgacctgggttgggtcgagcgcggtgcgatggtgaagccgttcgaggacgcgctgtttgcggccaaggccggtgacgtgatcggcccggtgaagaccgagttcggttaccacatcatcaaggtggccgctgtgcgcggtggccagggcaagtcgttcgaggaagtgcgtgacacgctggccgccgaacagctgaaggccgacggtgagcgcggcttcaacgagctggccggtcgcctggtcgatgccatcaacaagagcccgagcgatctggccgctgccgccaaggaagtgaacctgccgctgcagacgctgggcccgatcacccgcgcgaccgccagtggcatcgcggctgacccggccgtgctgcgtgcggcgttctccgacgtgctggtgcaggacggtaccgccagtgacccgatcgccctggggggcgcgaccaaccacagcgtggtcatccgcgtggctgcgcacaccccggaacaggccctgccgctggacaaggctcgtgaccaggtgatcgccgcgatccgcgctgaccgccagcgccaggccagcgacaaggcggccgatgcgatcctggccaagctgaaggcgggtgccaccctgcagtcgctggccgccagcgagaagctgcagctgagcccgatgccgggcctgccgcgcagccagccggtgccgaccccggaaatcaaccgcgcgatcttcagtgcgccggtgccggccgaaggcaagccgagctatggcaaggtcgacgtcaatggccacgcgctgctgttcgcggtgaacaaggtcaatccgggcgacatcaaggaagtgactgcagagcagcagaagcagctgaaggaacagctgagccagatcgatggcatggccgcggccaaggcctacatcgaggcgatgcgcaagaagttcgtgatccagaccaccgaggcgaacctgtaagccttgcggctgcatccatgagaaaggcccggcactgccgggcctttttttgtttgacgatgactccagcccggcacttcgctggactgcgcccaaacccgctacagcaggtttatcaatgacttaggcgcgtccatcatatgccggtgctttccgaaatttgacccggcttccggtcgcgtggctcccatgtggctctcggaatccgaggtttccgaggagtcatcatggcaagaatcaaactcaccaagtccgctgtcgatgccgccaagccccaggcgcaggccatcgaactgcgggacaccgtggtgcccggcttcctgtgcaagatcaccccggccggccgcaaggtgttcatgctccagtaccgcacgaacgccggcgagcgccgcaagcccgccctgggccagtacggggaactgaccgtcgagcaggcccgtgtcatggcgcaggagtggctggccgaggtgcgccggggcggcgacccgagcgcggccaaagctgccgcccgcaaggcacagaccatgaaggagtattgcctcaccttcatggaggactactccaggcagcgcaacaagcccagcactcagcggggctatcagggcgtaatcgaccgctgcatcatcccgatcatggggcggatgaaggtgcaggacgtgaagcgcccggacgtggccgcgctgatgaagaagctggcccacaagccggccgaggccaaccgcaccttcggcgtgctgcgcaagatgttcaacctggccgaagtgtgggggctgcgtccggacggcaccaatccgtgccgccacgtcccgatgttcccgcccggcaaggaaacccggctcatcgtggacgacgagctggtgaggatcttccggcatctggaacacgtggaggcggaaggattggagaactacgtcatcccgctggcgattcgcctgcaattcgagtttgccgcccgccgctccgaaatctgtccgctggagtgggactggattgatctggagaagcgccgcgtggtctggcccgacagcaagaccggcggcatttccaagcccatgagcgaagaagcctatcggctgctttcgacggcgccgcgccgggagagctgcccctacgtcctgccgtcgcccaacgacccggcccggcatctgacgcatggcgaacactatggcggctggaagcgcgtactcaaggccgccggtgtgccgcatgtcggcacgcacggtatccgccaccgggctacgaccgacattgccaattcgggcgtgccgaccaaggtcggcatgaagctgacgggccacaagacggtggcgatgttcatgcactacgtccacaccgaggacaagccggtgcgcgatgcggccgaactggtggcgagccggcggcaggccatcacgggtgcgctgcgccctgcggaggcgacggcatgatccagttcgggcttcctgggctatccgccgtcgcgctggagacgctggagaagctgccgtatccgagcgcccaacctcatggctcgattgtcgcatcgcagttgcgacaatttccatacttgccttctatatccgaacagatataatgatgagggagaaacgcaagctcctgttctgggaaggctcctcgaagaaggacttcaaggtgttccccgtccccgtgcagaaagacatgggcgtggcactgttcgtcgttcagttggggggtacgccggacgtggccaagccttggaaggggctcggctccggggtgtacgagctggtggaagaccatcggggcgacaccttccgcgccgtctacacggtacgggtcggcgatgcggtgcatgtgctacatgcgtttcagaagaagtccaagtccggcattgccacaccgcagccggacgtggagttgatcgagaagcggttaaaggcagtgctcgcccgatatggtgcgagcgggagatcgtgatgacgcgcaaagaccatcctcaaggcaccgacaacgtgctggccgacctcggattcgccgacgcggaagagctgtcggcgaaagccgtcttggcggtcaagctgaacgagctgatcgacaagcgtagcctcagccagaccgaagccgctcacatcaccggcatgacacagcctaaggtgtctcaggtgcgacgctacaagctgcaaaacatctcacttgaacgcttgatgcaggcgcttgtctcgctggaccagcatgtcgagatcgtcgttcggccggcgcggcgcgcgcatgccgccggcatcacggtcgcagcttaacgattcgagcgagcaagagccgcaatgaaattcgcatacgaagacctcagtgatggccagttcgagacactagtcgttctcctgtgccagcggttgcttggggtctcggtacagggatttgcgaaagggcctgatggcgggcgcgatgccaagttcataggaacggcggaactgcacccgagcaagacggtcccgtgggtcggtacaaccatcgtccaggccaagcataccaacggctataaccgtaacttctccgagtccgacttcttcagcacgacggccgcgaacactgtgctgggcaaagaaattccccgcgttaagaaactgcgcgaggccaggcagctcgatcactacatgctgttcgccaaccgtcggctggcaggcaacgccgaaaccgagatacgcgactacatcgcgtctcagtgcggcattcccgcctcgtcgatctatctctgcggactggagcaactggaaatctggctgaagcgcttccccgaggttgcgagggaagcagaccttgatccggtcgattcaccgttgatcgtcagccccgatgatctggccgaagtagtgcaggcattggcgcgccagaaagacggcgtgatcgcactgctagacgatccaccgactgcgcgcgtgacgtacgagcagaagaacgcactcaacaacatgagtgccgactacgccaaggcgcagcggcggaaatacctgaaggagacggctcaaattcgggctttcttggcagcaccggaaaacctcgacctgctgcgcatgtacgagtcggtggtcgatgagttccaactcaagatcatcgcgaagcgcaaggactaccagaccttcgacgaggtcatggagtatctagtggacctgttgttcaaccgcgatcctgtcttgcggcagcacgcccacaagcgcctgactcgcgccgtgctgttctacatgtactggaattgcgatatcggggaggtgggcgatgctgcggccgaccaagcactctcatcctgatcgcacggtcatcaacgtctcgttgctgctgctggctcgcctgaaggcccggcgcgtggatgagtacgacgtgctgcgcacgttcgcgaaaaaaagtgtcgtcggcggggacgtgctgttcctgccggcactgaattttctgtatctcatgggcctgatcgaatatcgccccaagaccgacgccgtggaatacatggggccaaatgaagctgtctagactttattccagcaagcctgacttgttcgagcctgtggagttcgtccagggcctgaacgtcgtcatggctgaaattcgcctgccggagaaccgaaacaaggacacccataacctcggcaagaccacgcttgggcgtttgctcgactttggcttccttgccaagcgcgatcccaagttctttcttttcaaacacgtcgaattgttcaaggacttcatcttcttcctggagatcgagctggaagatgcttcgttcgtgacgatccggcgcggtgtggaagaagccaccaagatcagcttcaagcgccatgaggccgggcatcaggacttgtcggggctaccgctggtggaatgggatcaccaggacatgcccttcgagcgggcgcgtgacctgttggatggattgcttgactggcgcgcactcaagccttgggcgttccgcaaaggcttaggctacctgctgcgctcccaggatgatttccgcgatgtgtttcatctgcgcaagttcgcggctgcgcattcggattggaagcctttcctggctcacgttctcggctttgacgctcaactcgtggcgaagcactacgagaaggaagagcagcttgcggagaagcagtccaccgcgcagaccatcaagaacgagctgggcgggtccattgaggacatcagcaagatcgagggcatcctgctgctcaagcaaaaagaggctgagaaaaagcagaaactgcttgacgccttcgacttccgcgcccaggacaaggacagcaccaaacagttggttgatgacatcgacgaacgcatcgcgtcgctcaatgccgaacgctactcgctcaaccagaacaagaagaagatcatcacctcgctggaagaggatcagatcctcttcaaccctgacgaagcgcagcgcctgttcgaggaagccggcgttctgttcaaggggcagatcaagaaagacttccagcagttgattgccttcaatcgggcaattaccgatgagcgccgcggctatctgcaggaagaacgcgcagaggtcgaagctgagcttaagcgcatcaatgcagaactgaataccttgggcaaaaaacgatcggaaatgctttcatttctgagtggaaccgacatctttggcaagtacaagcaggtctcggacgagatggtgacgctgcgcgctgacatcacttccctggagcgtcaacgcggcttcctgcatcgtttgcaggagttgcgaaccgagataagggcgttgaccgaagagcgtgggcatctacagacacagatcgaggcggatgtcgagaagcagaactccgatcagaacagtttgttctcggcaatccgcgtgttcttcagcgagattgtcgaagaggtgatcgaccgcaaggcgctgctgagcgtatcgccgaaccaagcggggcatctggagttcagggcggaaattcttgacgaatcaggcaacgcaaccagcgccgaccttgggcacacgtacaggaaactgctgtgcatcgcctttgacttggccatcctgcgagcccacttggacgacaagttcccgcgcttcgtttaccacgacggcgtgttcgagtctctggatgatcgcaaaaaggaaaatctgctgacggtcattcgccggtatgccgacctggggctccaacccatcatcacgctgattgattctgacctgccaacgcgggccgaagacgatgagccggtgttctcggccgatgagatcgtggtcacattgcacgacgagggtgagcacgggaggcttttcaggacgaaggcttggtagcgatggaggctttctcgtttgagtcagtgtttcgtcccctcttagcggaacaagaagcctacctgcgtctttatccgcctggtgaagctgtgctgcttgctttgcgcgatctgctggaaagagacagtcgcctactctacatcgatgccaacgagcgctccatcactttccgctttgctatgcatttgcagtcccatctgagggaatgggagatcgactgcgagttcaaccgagatggcgtcgagcccaagcggcttggccacatggagctatatccagacagcgaggacgaggaggcgaaaacagtctttccagatgtaatagcccatcggcgcggaaagaaagagaactttctcgttgtcgagttcaagaagtcaacaagccacgtagaccgaagtattgatcgccggaagctcctcggctacaaacgccaactgggatacgagcacgcactctttgtcgaggttggatcgggcggacaggcaagcattacatcgctcgaatggatttaacgccaaggtctacttatacagatcatcaagaacaaggctttgggttctgagtctgatgtatctgtgcctacccctctacttcaagctgcttcgactgccggtaggctgacgcagtctggcgggcgcagcgcgaataagaactacgccttccagtgggtttggtagttggggccgtcagaaagaggtttcgcgctcggcgggaagacttgaatggtcaacggaataggaaaatcggcgccgatgatcgcagcctcgccgggcttcaggttgggcaggaacgacgaagcggaccgatcaatttcgccgcaggcgcgttcgacaacctcgcggtcccgatcattcgtgagccgatgcaccacgagtgttcccatctggctcagaacaccttccgttatgtcgcgtgggcgctgagttgacagacagatgttgagtccgtacttccggccctctttggcgatcaactcgaatgcgtccaggcgggcgaccgcgtcatcgcctccgatatgccgcccgagaaagttatgtgcctcgtcgacgatgatgacaacagggcaactcttgaatgcgccatcgcgtgccatgttgagaagatgccgtccgatcacgttcgcgatgatctcgcgcgccttgaactcaaaggcaacgccgctcaggcatatccgaagcaaccgatcttcgttggagacgaaggacgagatgctttccgtcaatgcaggagccttcgacttgaagacacaatcgaaggaagatgaactgagaatgccgctaatgcgcgacatcaaggacaggcagtacgagacctcgcctgagtcgccaccccatttggtggtgtccttcgacccccgggccacaccgaatccgtccgggtagacacactcctgctcgatctgtgaaacgagcttccacacgtcgaacgcttgctgtggatcgtcgagcttctccgcaatgccagctttggcctcttctgccaagatcgggactttggactgatcgatctttttgatgatcccaccagtcgaaatatggggagcgagggtggcaagtcgaagactgcggatcgccgcgcgcagcttcggtccctgaaccttgccggcaggctcaaacagcgcgatgaagtccgattcaataaaagacgtttgcggcaaggcgcaaggagaggacgacttcgcagtgttgaccggcgcgcccaagtgaaagttggagacgtgctttccgtcaaacccgcgatactcccccgtcgcgtccaagaggataattttggtcttgtagcgcaggcattcttcgatgatccgagcggtcgtccaactcttgccgccgccagtggcgcccagaatcgcgcagtgtcggccgaacagtttctccggcttgaccgacacgtagctttcaggcgcgacatcgatcgagcccagcttgagaaggacgtggctggcttcggcctccgccgcctccatgaacttcggtaagttggcgatgaagctgtgcggcgcagcgtagacgcggtcgcccaggcgaggataggagtcaacgcccgccgagattcgaagtgagtccattgcgatggagcccagcagttggatcgtcccgatgccgtccaaatctggcaccctgccatgcgaggtgtcgatcaggcgcctgtcggcatctggcaaatggatctcgaccacccgtccaagcaggaggttgatctgtccctcgatcaggacgaactctccaacttcaccctttccgtatcggccacccagaaagtgggaaccgctgggcgagcccgcctcgttgagattgaacttcaccacctgggcggaaacggagcacaactggccaacatacaactccggtcggagcaatccgcgcggaaaagcgtcggtgacgtcaagcgcggtactcatgtcggtttgaccagcgacttgatgtcgcgcgtgagccgctgcgcgggcgtcagcgatttgaggtccggaatcatctcggcgaactcgctgaacgtggcattgatcagccacacgtcctcgccctgtttggcgaggttgtagagcgcatcccagtatcggttgttctccttgctccgagaggtcagatcatccgccgagggattgacgatgatcaaccgcaaatgcggattggtgcgaaccgccgcgacaatgggttccgacaagtgatcatcattgaaaccgaagcccgatacgatgaggcaagtatttggttctcgcagcgccgccaggtactgcgagatcagttccaagtgcggttggacgtaggactgttggtatttacctttggcgggatagatcagacaggccgtctccggagtcgggtcagtcttgatctcgatatcgcccgaactggattgatcccagttaaccgaaccatgcagcttgtacaggtgaaacacgccttccaacgggttgccaacctcatcgcctgtcgaaggccgacggacgatgtcgtacaggaagaaccgcggatcaaactgccggggctgtgtaaatgagaagccgtcgagcaaaaccagcccctgcttgcccgcagcgcgctcaaagcaaagatcgtagttcgtcgtgaacaatttcatccgcgagtcgcgaacgcggcgtcgagacagtcgatgcaggaaagtgcgatggctcgccaacttggaatcgtcggcgccatcgagaaaggcggaacattcttttaagatcacaccctttgagacggagacaaatttctcgacctgctcgctttttttgatctgaagatatgcatcgcaacgcgaaagcaaagcctcgatgttctcctgttcaacggcagtctcatagccgatctcagcaattacggcattagcctgttcggtcggcttccgctcatcctttccagtgtcaggattcgagttcacgcagtgatcccacaacgtccacatcgaaggaccgttgatctctccgagagacgtcccacttcctgcaagggcgaccacatgctgcatctgaagcgaggaaagcaataccgctttcagttcttcgcgtgcagcagcggcttcagacaaaatctgctgcctctttgcgtcgtcagcctcgccagttacatccggcctgagggacttccaagcgccggattccggactgaagaaaagttgttgaccgaaggtggtcggctgtgacgtcgtcatgtcgtccctacagatgtgtttggattcttccggatgcccgatcgcccgggaccagcctttggaatagtaacaaagcgcttcgcacattctggccgacccgcggcccaacatccacgaaagccaaggctgtgcgtcccggcgcgttccgccgtcgggttcgcgggccgcgccacgtgcagagtcgcggccatcctgctttgatccttggcgcctccggcccactcgggcctgcgcgttccgcttacccccaaaggcgactgtgtgagtatttctccagcagaccatgagatgggtgttaattcctcactcgccaacttcgtggcctacatcgaatgaagttgtcgtgtacgtttcgcctgtcctagcgttgagcccttaaggctgaatcgagccgctactcggttccgttgcgctcacgctgacgcaggcgcttcacgtaggcctcgtccagcagctcgtgcgggctcagatccaacgcacagttcgccaatgaggccaatgtccggtctgtgagcttgaaccccctcggcagttggccgtggttctccgcgctgttttcctcgatcgaggcgaacagtgccttgaagaagtcggcattggagggacgtgtcgccgcagtggcggcggccgtcagcgggtctgtggccgccatctccgccttctccgcatccgatgccagttcgcgcatgaagtcactcagcgagggccaatacttcaaatcaaactggccacgaagtgcatccagcttctcttggacgtaagactgaaacaggtagttgtcccgggatgccgcttcgatcacttcgccaacgtgatagtgggtttcgctgctgaagcccgaggtgtcgtgcaggtctgagcgctgttccagcagcgccgccaactcgtctgccttcctcgcgatttgccgattgacgttggatagatcgctgcgtgcagcgcgagcctcctgcatcttctgtggattccagaaagcggcggtgctcaacacgaggccaagaaagacctggagcgccggcgggtgggaatggagcttttcgtgcaattcatcataggcgtccttcaactcgacgccacgcgccagcagtcgatccgcgacagcgttctcgctgggcaggatgtggtgttcgatgttgtactgcctcccctccaagaggagtttttcgcaggcttgctgcggaatcatggtttgagacgaactcacggtcttgtccttgatgttttagacccttcacagcgtattgaaccctgccggatttgtcggtacccgagcgactgtcgatgaaccgactctgaggtacccacgcaggtgcagtccgggcgtccccggccacctgggagatggccggtcgcgctgtcgtgcgcgtagcgcatcgagccgcctgcagcgtctcgcccctgcagggcttccatcgttccctcgctccgctcggctgacgcctccggcccggattcctcgatccgggcctgcgcgcttcgcttgccgtacggtcggcgtgttggggggccattgccttgtccagccgtctcccctgacttcatcaccttgtccgcgactgtagcccgcgcccgtgtgccgtcaaggcgcgcagggccgtgtcctcggctgcgcctgcgggccgcaccaaccctgcgcttgtttccttgacggtcccccgtccgcgcgctcctgaccgtcgcgggcgatgaactcaggaaagacggtggcaacagggccaaccgggttcctcgtgccgaccgcaccaaacagccgaaaggctgggctccgaatctaggaatccggtgtgcggtttgaacagcaaacccttttcgtcaggagaaatgcaatgcaactcgcatcccgattcgcttcccgttccccgtcgctgcgcagcgactacccgctgtccgacgatcaaatccgcaaggtcgcgccgtccatcttcgcggacgccccgcacgaaagccgttccgaacggtacgcctacatccccaccgccgccgtgctggcagaactgcgcaaggaagggtttgaaccctttatggcagcgcaaacccgcgtgcgccacgacgaccgccgcgactacaccaagcacatgctgcgcctgcgccacgccagccagatcaacggcgcggaagccaatgaaatcgtgctgttgaactcgcatgacggcacgagcagctatcagatgctggccggaatgttccggttcgtgtgcagcaatggtcttgtctgcggcgacacggtggcggacgtgcgcgtgccccacaaaggcgacgtggccggttccatcatcgaaggcgcttacgaagtgttgagaggcttcgaccgcgtgcaggaatcccgcgattccatgcgcgccatcaccttgagcgatggcgaatccgaagtgttcgcccgcgccgcgctggccctcaagtacgacgaccccgacaagcccgcgcccatcacggaatcgcaaatcctgatgccgcgccgccacgacgaccgccgcccggacttgtggagcgtgttcaaccgcacgcaagagaacctgacccaaggcggcctgcgcgggcgcagcgccaacggacgccgccagcaaacccgcccggtgcagggcatcgaccaaaacatccgcctcaaccgtgcgctttggctgctggccgatggcatgcgccagttgaaagcctgaatccccacgcggcaggggcaggcagcagcccttgccgcttctctcgctgctgcatccctaaccgcaaggagttatcaccatgaacgccgatacccaaatcgaaacccgcgccatcgaaaccgccgcgccgctggaagtggccgacccgaccaagaacctgattttggttccgctctcgcagttgctgccgcgccgctccaagcgcaacgcgcggacgacctcgcgcatgtccatccccgaactggccgcgagcattgcccgcgtcggcccgctgcaaaacctcgtcgtcatccttgccgctgatggcgagcattacgaagtggtggccggcgaccgacgcctgaccgccttgaagctgctggcgaagaagaagcgcatccctgccgactacgaagtggcgtgcctgctggtgcccgacgcttcggcccgtaccgtcagcctcgcggaaaacctgctgcgcgagcagatgcacccggccgaccagttcgaggcgttcgccgcactggtcaaggaaggccgccccatcgaagacattgccgccgacttcggcgtgaccccgctggtggtgcagcgccgtctcaaactcgccaacgtctcgccgcgcctgctggccgactaccgggccggagccgtcacgctggaacagttgatggccctgaccatcaccgacgaccacgccgcacaggaaagcgcgttctacggtgcgcccgaatggcagcgtggcgcgtccgcgctgcgcgaacgcctgaccgaacgcgaaatcgacgccacgcatccgctggtgcgcttcgccgggctggacgcctacacggcggcgggcggcggcatccgccgcgacctgttcgcggaaggcgatgccggaacctacctgaccgacgccgcgctgctggaaacgctggtgcgtggcaagctggatgcgctggccggggacgtgcgcgccgagggttgggcgtgggtcgaagccgtgccgcatatgagctacgccgagcggcaggcgttccagaacgcgccgcgccagcgccgcgaaccgaacgcccgcgaagcccgccgcatcgcctcgctgcaaacccgcctcgacaagatctacgccgaactggaagaagcctacgacgccgaggacgaggacaagaccgaagcgctggaaccgcgccgcgaacaggttgccggggaactgcaagccgtggaggaagccttgcagggctacgccccggatgtgcgcgccgtggccggtgccatcgtcaccctcgaccgcagcggcgaagccatgattcatcgcgggttgctgcgcgaggccgaagccaaggcgttgcgcacgctggaacgcttgcggcaggggttcggcagcgcggaaagcgaagccgggaacgacgacgaaggcgaggacgccgaacagcccaaggccgcgagcctgtccgaccggctggcgcagcgcttgagcgcgcaccgcaccgccgcgctgcaaatcgaagtcgcccgccatccgcaagtcgcgctggccgcgctggtgcatggcatggtgcagagcgtcttgcaggacaaccactacggccacgacttgccgctgggcgtgagcctgaaagtgcaagaccggctggaaggcatggcccccgactggcccgagtcgcccgccgccgtcgccctgcgcgagttgcagcaggtcgcgggcgaagcgctgccgcaggacagcgccgaactgttcgccgcgctgctggcgatagagcaaggcgaactggtgcggctgctggcggtatgtgtggcggcgaccgtggacgtggtgacgcctcgcgccacggcgcagcagccgggcgcggaactggcgcaggctgtggggctggacatggccgcatggtggcagcccaccgcagacgggtatttccagcatgtgccgaaggccgcgattctggaagccgtgggcgattttgcaccgtcgcacgctgcccggctgacgaagttgaagaaggccgacattgccagcgaggcggaacggctggccgatggtacgggttggatgcccaccatcttcaaggccgaaggcccggaagctgcgccggaggaaacgcaggcgcaggacgccccggaggatgccgaggcaatggcggatgaacccgccgaggcactggccgcttgacccgcgccgaaggcaagcgccccggcctcgaccggggcgcttcgcttgaaggagaagcccccatggcccgcaccaccaccagccgcccgcgcatggcggcgatctatgcgcccggcgcagtacgcgcccgccgctggcacggcgaaggcgacgtgcgcggctaccgcccaccctcgggctggtcggcccgcgccgacctcaccgacattcaccccatcacgggccgcgccttgccgcgtgccatgtggtggattatcgaaaccaaggaataacgagccgcaccggccccaagccgttccgccttggggccggtggtcgaaaatccgggcgcggcggtggccgcgcccggttccagcgtccaaagcaaaatcgccacgtcgccgccttcgaccaggcggcgacgtggcggacgtgcaagtgccttgcgcgcggtacggcgatcggcgcccgctggcgcgggcaaggtttcgatggcgccccgccgcaatgggcggggcttgtggggctacgccccggcttgctgcggcaggttgtgccaaagcgtgccgtcctcgacgctggcggttcgcgcctgtacgtcacgaaggacggttcaccgacaagccacccggcttcgctatggcgcatccacgccacgcctcaaccacgtcgtcgcaatctgcggcaagaagcgttctcgcctgtcgttggggtgttggccttgccagtgtcagggcgcaagccggtgaagccgtcacgcggggatgccgagtcggccacgtctccattcgggagcgggcggcccgtgcgtccttggcttgtcgtgaatcctggcggtggcacggctgcgccttgggcttcatggccgcaaccttccagcgaaaacaatttcccctgcgctgcgcgcattcctcgcgggacaaattcttttcgcttccaggttctccacggtattgcgaccgctgcgcggtgcggccagcccatcccccgccggccggatcacaacaaggacgcactggcgcgaccttgttcaaaccgaaaggagagaaacatcatggctaacatcggcaccttcaccgcagagaaagacggcttcaccggccagctccgcaccctgaccctcaacgtcaaggtcaagctggttcccaacgacaagggcgacagcgagaacgcccccgacttccaccttcaggcggccggccacgagatcggcgcggcgtggaagaagaccagtgaggccgggcgcgagtacctgtccgtgagcatagacgacccttcgttcccggcgacggtctatgcccgcctgatcgagaacgaggacggcacgcacgacttgatctggtcgcgcagcaagcccaaggcggcctgacggccgcccaccgcgccccgcccattgcggcggggcgcggcatctctcagttccaatcgctcgcctgagcgttaggcgagcgcaatcttccgatctacgccgcaaaaatcagcgatcaccccaaccaccgcctgcgcctgtgaaggcagtgcggatggcgtgggagcttggggagagaaggctgcggactctaacgcaagtgccacatcgaacgccgctgaccccgttaggtttctggcgaagaactcggccaacagatcggctttgacgttactagcctgttgctgaagttcctgttgcagcgtatcagcgagaccaggttgagccgcaacgccttccactagtgctgccgccatgcgaccgaccttctccgtgaaagcctgccctgatacgccgtagcgtattccacgctcgatgatctgacggcgttgctcctgatcctcagcaatgaattccctgaggatgaagtccatcgcgatcatgaaatgcgagcatgaggcatagaagagtctccatgcccgatttccggaggcgatttgggccagcaaatattcgatgtcttcaagccaggcattgcatccgtcgaagttcaaggagtgaagcaggcgagatttgctttcttcatacctaccacgccagtcaccacttaatcgacctagagagcccgattcaagatccgcaaggaaatcttcctcggtgatgcgctccttgtggctgcgtgcgctattggttaatcgcgaaaggaacttaccatccaatacccggacattgtgttggaggccaaactcgcgaacatccggcctagaatccgttgtcgcgacaatgcacgagtcaagacctagaactgactgtaggccctttgcccaaaaaatgcgttcaagagcctgcggtgtcttcttgttcttgatgtcgacgcagatgcgttctctgctgagaggcgaattgcgcgcgtatagccacagatcgacatccgtcacatcgaatcgatggaatgtaaacttgatgcctctggcaacatagtagccaatgcttaggaaataattccgcagtgcttcctcggcgacagagccctttagtggttggcttttcatcgcttgagcccgccggttcgaatttcttggagcaggttgcgcgccttcagtttcactgcctctgtggcatttttccgctgcacctctcgattcaattccggcgcgacgtattcagtgatacgtgcaccaggaatatgcgaaacgctctcggccgttatgtcgccatcttcgattacggcgagcgcaagtcgccccacttctggcttcaggagcctcatggtgaacatgccgttatcagcaggcgtcacagcgacgacgcctttcaactcaagggcttgatagtcgcttccaatggcggtggcgggaccgacgctatggcctgcgatcagcttattcatgagtgccgagaccatctggatacggccgcggtagtagctgctgacggtcatcccgtaggtgagcgaggctaccagcgccttggctaaatccagcgcatcgtccgcaatggagttgctgaatttggagaatgcagccggacgggtaacgaagtggctcttgccctgatcattgccgacaacgctgacatcgaacagaccaatggagtgaagacgtgcgaaaagatcctgccctagaatcctgttaaccgtctccaatggcaggcaacctgtttcttgaagcttctgattaacttctgtcagaagcgcagcctcgggggctttcaaggttgatagaattgcattgaccttccgcgcatcatcgcgccggaacaggttgccattgaaaagcagtttctcttgagccgagatcggctcagagtcaaagaagccgatgttggtcgcaagatccaacgtatcaccgacctccttgcgtgaaagcttcaagtgatcggaaacgacctcggcgatagctttgtccgtcgtgggcgtctcggaggcaatctctgatacgaagattacggcttcttcatgtgcctcgtggctgctttcatcgaaaattctggatgtgtgctcaagcacactatgtccagtcaagccaaggacttccacccccccgttgcccggcaggattagtctttgccgcgcgagttcggcaacgattgcagggagttccgttttggggctgatgtggttggcacgtgcgagtgcctctaggcgttgttgcgtgacaacgctttgcctttccgcagagattgcggataacaacgtgccacttttcccagcgaaggcgatcgagtcgaaatcttggttcgttgttgcttgaagttttcttgcgtggtgcaacagccacgcgccttgggtcttcttatccatgaacatcccgttgctcgatagatagcagctcttgctctacttgcttaagcacacgccttaccttgtccatgtcgtcgcctgcataggccagcgtcagcaacgtgagcggatgcacgtccatgacctcgcacagctcggtcagcttgtgcatggtcgggcttttcaagtcgcgctccaacgaactcatgtaggtacggctggacacgtcggagaacgcttcctggctcaagccacgcgccttcctgaccgtccgtatggccgtcgccaatgagtgtttcgctgccgccaacttggtttcccctagaaaaccaagatgacagcccattgaacccaatagggctacaatctatagtgttcatttctgcgaagcaatccgcttcgtgtctttacgggaatccgcatggacgggttccaacagaatcggggcgccgcatctgtgtctttcctggcctgcgtaattccgcttctgcgtttccgtgcatgtacggattcgatggcttgcgccttcgtgctttcccgccaaagcacgcatccgcttcagcggttccgcgcttcgttggaaaatcgtatccgtgcatcctcggatgcgtggggattcgggggatgacccagccgcttgtcaccactgaacagcgagcgcaactgctcgccgtcggcgcgtgccgcgccgacggccggagcatcgaccctatgccagtggtgcgactgttcacccctgacgcgcacgccacctggctgctggccgcactcgatccggccgatggcgatacggcctgggggctgatcgacctcggaataggcatgcccggcctgggccatgtgaagctgtccgatctggcgtccatcgtcgggccgcgcaagcagccggtgatgcgtgatcgctacttccagccggtgcggcggctatcggagtacctgcggctggccgaagaaaacggctcgatcaccgactgaccaacccccagcaacaacagcgcattctgactatttcagtcttacccaagacctgcgcagtctgaatccgcactcttgcaccgaagcggtgcgttctgttgcaaacagtcatgatctttggtgcgggctgctgcacggtgctccatgctgcgcgccattttcgtggcggcccagccgtcgcattcagacgatttccgcaatgccctggagcgaatcagtcttgacaccagcagttacagcttatcccgatttcgatgacgacttgatggcgactcgatagctcccgcacggcggaatccgtggcgacgttcctgctgaatgacaggaggctgcgtcatggctgacccgagcgccgaacactggtatccgaccgccgcgtatctctacacgctgcacctcgacggccccgcgctggcgtgggaatacctgcgtcgccaccccgactaccgccgcgactggctgcgccggcgccgccggccagaggccgccgcgcgctggggattgcgcctgctggaagatcccgccctggatgcgcgcgacgcgcatccggcttggttccctgaccacgatgctgtcgtgcaactctatcccgatgccgacccgccacccgatgcggtggccttcgcgttctggcgcattcccggccagaaacgcctggtccacgatggcaagcgcctggtgctgctgacacgatggccgggctgctgcctgcggctggtgatcgctcccggcttggccgacggtatggcctacgcctatgccattcgcgcctgcggcgcatcctgcgggcgctatcaggcactggcggctgagctggacaagctggccatcgctggcgacaccttacccgcgggaacggcacggccacggccgacactcgccacattgctggagttgaacacgctccaggcgctcgacggcaccctggcgggcgcatccttgcgcgaagtggccgaaggactgttcggtgccgatgcagtcgcagacgactggtacgccgatagcgccttgcgcgcccgcgtgcggcgactggtgcgccggggcgatgcgctgatgcgcggcggctaccgccgccttgcacagcttccgcccgttgcacagggacgcgctgcatcccatgcaaaacgtccctgagcaggaagccttgctttcttgaaagtgcctctatccggctgcgtggtgtggccgggcttgatggaggtacatcccatgcgacccgctcccttgcggcctgccgccactgctgtcgctgcgcccgtgcagccccaacgctacctgaccaacgacgaagccgccgaatacttgcggctgtcgccgcgcacgctggagaaacagcgcgtgatcggcggcggcccgaagttccgcaagttcggccgccgcgtcatgtacgcggtggccgacctcgatgcctgggccgaccagcgcagctacgaggccacgtccgacccggaatatgccgagcgtcacgcgggcgactaccgtgatggccgctgatcgtcggctcgccggtggccatcgtcatgtccagcccatcgctgccgtcgaggcagcgatcgcagcagcgggaacagctcgacctgttccgcgcgctgccgggcgacggcatggcgccgcgcgacagccaggacttgatggcctttccgttcttctcgctggcgaagtcgcggcgcacggcgccgatcgacttccgcagcgggaacatcaccatccgcgtggaaggcacggccgagcacggcatcgccacgatatgggatgccgacgttttgatttgggcggcctcgcagatcgtggaggcgcgcgacgcaggcattcgcccgtcgcgctggatacacgccacgccctacgaaatcctgcgcttcatcgggcgcggcacgtccctcaacgactacaagcgcctgaaagccgcgctcgaccggctgcaatcgaccagcgtggccacgtccatccgcgaaaccaccgggcggcgcttgcatcgcttttcgtgggtgaacgaatggcgcgagctggccgacgccagcggcacgccgctgggcatcgaactgatcctgccggactggttctatgccggcgtactcgacgccgccctggtactgaccatcgacccggcctatttccgcttgaagggcggtatcgaacgctggctgtaccgcctggtgcgcaagcacggcgggcggcaggaacacggctggcaattcgacttccggcacctgcaccggaagtccggcagcgcggcgcgcttctcggacttcgcctacgacctgcgcgtgctggtcgcgcggcagtcgctgcccggctacgtcctgggcatcgagccgatgccgggcgaaaggctggaactgctgaccttccggcccgtgccgttcacggcacggggataactgagggaaaaggtgtggacggcctcgtgctatcaggagtacagggtatcgtgctatcgggagtacgcctatcgtgctatcaggagtacgaaaacgccgcaaagccagtaacggcgcgggttttcgccccctctaacttacctaactataaatctctaacttttagtagaagcgcgccgtttcggtggacaaccgcaaaacggcacggccaggccggctttccagcagggagggccgcgccatgatcttcgcgtttctcaatcaaaaaggcggcgtcggcaagaccacactcgccacccacatcgccggcgagctggcgatgcgcggtctgcacgtcatcctgctggacgccgacccgcagggttcgtcgctggactggacgcagcgcagaagccagcagggcttgccacggctgttcagcgccgtgggcctcgcccgcgaaacgctgcatcaggaagcgccggagctggcccgccgcgccgatcacatcatcatcgacggcccgccgcgcatcgccgccctggcgcgttccgcgctgctggcggccgagcgcgtgctgattcccgtgcagcccagcccgtatgacctttgggccagcgccgagatggtggcgctgatccgcgaggcacaggtgttccggcctgcgctgcgcgcggcctttgtcatcaaccggcgtgtcagtaccaccatcatcggcagggaagcacggcaatcgttggccgaacagccgctgccggcactgcgcagcgaagtgcgccagcgcatcgtcttcgccgacagcgtggccgctggccggctcgcccgcgaaatcgcgcccgacagcgccgccgcacgcgagatcgccgcgctcaccgatgaactgctgcggtggccgacatgagcggcccgcgcagcaagcgcgtcggcatcggcgcacgtccgcccgcgaatccgcacgccgaggcgtggattcgccagggcgatgccgatgcactcaacaaaggcgacctctacaccgcacgcctcacgctcgacgtgacgcccgcgctgcgcgcacgcatcaagatcgccgccttcggccagggcgtgaccgtagccgaactgctgcgcggtctgctggaacgggagtttcccgagaaccgcatggagagcacgccatgaacgcatccctcgcgaccgccgcgaccgccgcgaacgcggccacggctacgccgccgcattcgcttccaacactcgccggccgacccggcaacgtgccgatgacccgcgtatcgctcgcctacatcgagccgcgcttcaagctctatctgcgcttcggcgaacctgcgcgcacgctgcggctcgaccgctggcggcgctgtgcggtgttcctgccgcgcatggtgttctgccgtatccgctggcaagccaacgactacggcacgatccgctggcagctcatggtgatgcaagccgccacgccgctggacgacatgcagcgtatccctggcgtgcggccaggcgcacgcctgctgctgcacgccgaaggcgaaaacgcggtgcgtgccgtgctggaacgcatcgacggcatcgaagggcaaggcatcgccgccatcgacgtgtcgcccgcgtactggcgcacgctgggcaaccgcctggcggcccgcctggcgctgcccgaatacaccgccgagcggcacgccgcctggctggccggaaaggcgctgccatgacgacccaatccaacaccacatgcacgcacgaagtcgcgccgcatcctcgctcgcgcctgcgcgttcgcatcgtgctggcgggcttcgctgccgtcggcctcgctgcgctggcctgggcggctttcgtgtcgccgctgccgcgtctgacctacaacccgtccgacagcgtggcgatcggctggtatcgcatcgaaccgttcgacccgcgcaccgcctcgctgccacgtccgttgtccgtggacagcatcgtgctggtgccgctgcccgacagggccgccatgctggctgcgcagcgcggctacctgccgacccgcgttccgctgctcaaacgtgtgggcgcagtcgcgccgcaacacgtttgcatcgtcgccgggcagctacgcatcgacggcgtgcctgcggccgctgcgctgcctgccgaccggctgggccggccgctgccatccttgcagctttgccgccgcctcgaaccgggcgagctgttcctgttgagcgtgaccaatccggcgtcgttcgacagccgctatttcggcccggtcagcgcatccgccgtgatcggcgtcgcgcacccggtctggctgaagacacgcccatgatggccgccgattcactgcacgttgccgtgcctctcatcgtgccatcgggcatgccgttccggctgccgccgccgtgtcgtcgcgcgtgcagcgcgggcgcattcgcgccgcgcttcgcgcaacatccggcgcagccgtccagcgtgcaggcgtcttgcctcgaacgcgcccggcctgcggccattggcgcgttcgccggcgggctggctgcaagcagcgcagcgccgccgggccgccgacgcccggagcgacagcgaggggcaaaggcggaaggcaagacaaaaggacgtggcaccgggccgcgtcgaaagccagtctgcacatgggggtggcgcggcacggagcggcttcgccgccgtgccgcgttcggcgcgaaggtcgcgccaatgcgggcatgtccgcgtgcttcgcacgaccggacacgccagagcttgcagggagaacggccatgaccgaccgccgcgacgacgatttccgcgtgcgccccagcgccccgaagaaccggggtaagggccaggggcagagcttcgtttccaaggtgctcaagcaggccggaaaagccagcagcggcaagtcggcggtgcgccgtcctggggcggctgccaccggccagcgtcccggctcacgcctggggcgcggccatacggcggcgcgcttcgccggcgcgaagctgacgcccatgtcgcggcgcgtgaccatcaaaaccttgctggtcaatcaccaacgggccagcccacagtcgctcgccaagcacctgcgctacatcgagcgcgacggcgcgggtcgcgatggcgaaccgggccgggcctacgggccacaggccgacgaagctgacctcgatgccttcaaggaacgctgcgccgatgaccgccaccatttccgcttcatcgtctcgccggaggacggggccgaactggacgacctgcgcacctacacccggcatctggtggatcgcatggaagccgacctgggcacgcggctggattgggtggcggtcgatcactggaacaccgacaacccgcacacccacctgatcgtgcgcgggcgcgacgacaccggcaaagacctcatcatcgcgggcgactacatcgccgatggcttccgccaccgcgccgccgagctggcgaccgaatggctggggccgcgcaccgagctggagatccagcagaccttggggcgcgaggtggaacaggagcggtggacgagcctggatcgcaccttgaagcgcgaggccagcgacgatggcctggtgcatgtcgaacggctcaacgaaccccgcttgcagcgccagcgcctgctgctgatcggccgcctgcagcgcttgcagcgcctgggcttggccgacgaggcgcagccgggctcctgggccatccataccgatgccgagaagaccttgcgcgccctgggcgagcgtggcgacatcatccgcacgatgcagcgcgccatgagcggacagccgcgcgagctggcggtgttcgagccgggcgatgacggccgcaccatcttcggccgcgtagcagccaaggggctggccgacgaactgcacgaccgcggctatctggtcatcgacggcgtggacggcaaggcccactacgtcgcgctgaacgcccgcgacgagctggcgaactatccgaccggcgccgtggtggaggtgaagggatcggccgacgtgcgcgccgccgacaggaacatcgccgcgctggcgagcgatgggctgtatcgcaccgatcatcacctggcgattgagcaaggccgagccaagcccggtcgtgacccgcaggaagtcgttgcggcccatgtccgccgactggaagccctgcgccgggccggcatcgtggagcgcgtggccgacgggctatggaaggtgccggacgacctggccgagcgtggccgccgctacgacgcgcagcgcctgggcggtgtggcggtggagctgaaatcgcacctacccatcgagcggcaggcccgcgtcatcggcgccacttggctggatcagcagttgattaacggcggccgaggcttgggcgacctgggctttggtggcgaggccaagcaggcgatgcagcagcgtgccgacttcctggccgaacgggggctggccgagaagcgcggccagcgcgtgatcctcacccggaatctgttggctacgctgcgcaatcgggaattggcgcaagccacgaaagacattgccgccgacaccggactggagcataggcccatcgccgacggtcagcgcgtggccggcatctaccgtcgctcggtcatgctcgccagcggtcgctacgcgatgctcgatgatggcatggggttcagcctggtaccgtggcggccggtgatcgaacagcggctggggcagcaactcgccgcgacggtgcgcggtggcggggtgtcctgggagtttgggcctcagcgctggcctggcatcggatagaactgttgctcataagcaaagccccaccaaccgccttgaaaagcgccaccgcatcctgcggccaatgcacctgtgagcgcggtatgctcgacttctctatcggcgggtctcgttcgctcactattcccaatacctgtccgcgctccttgccctgccagaccttctggcgatcgacggtactcgcatcaggtaggtaattgggtcacaggctggcgtaaatagtgccgcggcgtgaccctgaaccattgcgcttccgtcctagctgcgcccggctttcgagttgaatctgtcattggagttatgaagggtgggcggacaagcctgcaggatgaatttcattgattcatggggacgcgaacacggacgtaagtgcctcggcccggctggctgtccagatcaaccgagccgccgtgcttcgacaccgccgcctggacgatggccagcccgagcccgctgcccggtttcccgaccgacgtactgccgcggtagtggcgctcgaaggccaggatgcggtcttcctcgtccatgccggggccgtggtcgccgacctggatcaggaccatgccgttgtctgcggtcgcccgcaggtcgatgggcgatccgggagcgtacttgcgcgcattgtccagcaggttgcggatgatctcgcgcagcatggtcgggtccatgcaaacacgaagtccgggagccgcctgtacggcgatcacgcgatccggttccagttgcctgacctcggccgcgagttcttccagcgtcggcacgagcgcgatccattcgttcgatgggcgacgcatgacatccagccgggccagcagcaacacgtcggcgaccagggcgctcatccttttgacctcctgctgcaggccatcgagctgggtataggcgctggtatcgccagggcggatggcgtgccgcaggttgtcgagcgaggcggacatcaccgccaatggcgttcgcaactcgtgcccggcctcggccagatggcttcgcaaccttgactcctttgcctgggcgtcgcgtgcgaccgtggcctgggccagttgcgcgatcaggtatccgaccagcgccgacagcaccaggctgatggccgacactgcccaatagcgcttcagcacgcccggacccacgcgcggatagaccagcaaggccatcagcaggatcgccaacgccagcacgcagcacaccgcggccgaaatccaagccgttcgcgtggagcgcttcatccgattttctcctcgatgcgcagtgtgtagcccacgccgcgcacggtctggaccagacgcgggcttccatcggcctccagcttcgcacgcagcaaggacacgaatcgatccaccgtttccgtaccgacttcggcgtccactccccagaccgactccagcaactggctcttgcggaagacccgcccctgctcgcgcatcaggccgaccagcagatcgaactcacgcgcggacagggccaatggcgaatccgacttccatgcgcggcgcctgagtggatcgacacgcagatccgcatacgccagcaggtcgctcgatcccgctccgcgccgaaggtgcgccaccagccgcgccttgagttcgtccatggcaaagggcttggtgaggtaatcgtcggccccgccctccagcgccacgatcttgtcccccagttcggtgcttgccgtgagcatcaggaccggcacctgtgtgcgtttgcggatgagcgggagaagcgccaggccatcgatgtcgggcatggccaggtccagcacgatggcgtccgggcggcgctgtgcgatgcgcgccaacgcctcccgaccgttggcggccgtgtcgacctcgaacccgcgcaagcgcagtgcgacttccacggcgcggcgcaggttgggttcgtcgtcgacgaccaggatgcgggggctctgctgcatggggtgcctctgcggtgccggctaaacctaaaccaaccagccgcagcgcatccagccggctttccggattccttccgatatcgctctcgagactggcggtgtccgatccgggacagtcatggagatacgacgatgaagaagcagaatacggtgatcctgatgctggttttggccgttccaccggcgtgggccgcccaggataccggcgtcagcggcaacgggatggcggcaggccaaggctcggcgaatggacaaggcctcgctgtcggccaaggggaggccagcgggaccggcacggtctactaccgcggcgaagatggacttatccatcgcaaatcgggtaccggaaccgtggatggccgtggcgtcgcggtgggcgcaggcgaggtggacggaaaggcactggtcgccggccatgggcgggtcgaaggggatggcgccgtccggcccacgcatgggaacacccctgtcagcggtgccatcggaagcggcacggccacgggaacaggggcggccatcggcaaaggtcaggccagcggaacggggacggtgtattaccggggcgaagatggccggatccaccgcaaatcgggcaccggttcggtggccggacggggcgtggccatcggagatggttccgtcaagggcaaggccgccgtacgaggcaaaggccaggcccatggctatggcatcaagcggccttgatagccagacgcgcggcgccccggtcgtctgactggggcgatcacgtagctggctgttacccaaatgtgatcacttgacacgtcagcgcggcatccagcaaggcgttgtccctggcgtgtcttccacatcgagcaagaaggagcatgcaatgcacactgccattcgctggatcgccccgatgctgctctccacactggccgttaccggctgtgctgccgcccagcaccgggattgggacaacaatccgcccggccccgccggcggccccggcaccaactgggaaaacccgccgggctggcgtggcggtccgggcgcttcgcccaaccagcgtttctaccggcgcgacggcgtgcgttacgagttcaagctcgtcagcggcggttattactacagcccgcgctggggctattggcatccgcgatacggcttgtggaaccagggccgccgctgctggatggatatcgacaacaacccgccaggtccggccggtggccggggcaccaactgggaaaacccgccgggctggcgcggcgggccgggggcatcgccggatcggttcgaccgttgccgttgaacgtgcgtcccggacccgcttgtcggacgccacctcgaacgatgtctcatcacatgagcactgaaggtcgtcacgcatgaaccgtcagcacgctgtcagcgcggccaatcgttttggcctgggcgcccggcccggtgagatcgattcgatcaccgacccgcaggaatggctcctggcgcagttgcgaatgccggcttcggagccggcgttggccgaattgcccggcagcctggaatatctgcgccaggacattgccctgcggcaaacccggcgcgaatccaggcaacgcggcccggccgggggcgcgatgccgctggccaggcgccagcggcaggcgcaattgcatgaactgctgctgcgccaccaggttgccgtggccagcccgaccagcttcagggagcgcatggtgcggttctggtcgaaccatttcgccgtgtccgtggacaagcgcgtggcggcgccctatgccgcgccgatggagcgcgaagcgatccgcccgcacgtgctggggcgattcgccgacatgctgctggcggtggaaacccatccggcgatgctgcgattcctggacaacacgcgatcggccggggcggactcgaaactggcagtccgcgcacatcggcggaatccggagcgggaactcgggctcaacgagaacctggcccgcgagatcctcgaactgcacacgctgggggtgcaaggcgggtattcgcaggcggacgtgaccgagctggccaaggccatcaccggatggagcgtgccggcgccgcaggacttcgagcgcggcgcgccggtgcgtgccttcatgttccgcgccaacgcccatgaaggcggatcgcgcgtggtgatgggcaagcgctacgccgaggacggactggcgcagggccaggccgtcctggccgatcttgcggtccatcccgccaccgcacggcacgtgtcgtggaagatcgcccgccacctggtcagcgacgagccgccgcaggcgctggtggaggcgatggcaagaacctggctcgcttccggcggcgacctggcgcaggtatatgccgcgttgatccgccatccggccgcctggggcgagtcggcacgcaagttcaagacgcccgacgactatctgctgtcggctgtgcgcgccggcggcgtgctggacagctcccgcccgcaggccctgtacaccttgctggacaggatgggacaaccgccgttcaccccgcgctcgcccgccggcttcgccgacgaggccgcacagtggagcggtccggatgcgctctggaagcggatccagagtgcgcaggcgctggccgaggccgtaccggaggatcggctcgatccggaaggtaccgcccgcgccatcttcgccgacacgctggacgaagaaacgcggtccgccctgcgccgggccgagtcgccgcgtgacggcctcgccctcctgttcgccagccccgccttccagtggaggatctgaccatgacgctgacccgacgcatgttcctgggcgctgccggcgcggtgaccacgttgaccctgtggccgtggcagggccaggcccggacagcgggcgatacccggctgctggtcgtgcttttgcgcggaggactggatggactgcatacgctgattccccgcgacgatccccaataccgcagcctgcgcggcagcctggttcccgacgatgcaccggcgctggatggcagcttcgcgctgcatccgtcgctgtccttcgcgcacgatctttatcggcgcaagcagctgctgccggtggtggcggtggcccctccgtatcaggagcgttcgcatttcgacgcccagaactgcctggagaatggcaccggtcgccccagtggcgccgggaccggctggctcaaccgctgtgccggcgcaatggccgatggcgaggcattggccatcggcagcgtgatgccgctgatcatgcgtggcccgggggacgccgcgacctggtcgccgcccctgccggaggacgtcaatccgatcctgttgcagcggctcgagcccctctattcgcatgacgcggcgctatccgccagtttttcccgggcaatggccacccagggaacagtcgccggcgtgggcggccgcgcagcgcgcatggtggccgccaccacggcggcggggcgcttcatggccaaggccgacggaccgcgaatcgggttcgtggaggattccggctgggacacccacgccaacgaagccgcgatcctgaagaacaagctgtccgagctcgacgtgggactgcgggccttccacgaggccgcgcagccgatctgggaccgcacggtggtggtcgtggtgagcgagtttggccggaccgccaaagtcaacggcaccggggggaccgaccatggaacgggagggctggccttgctggccggcggggcggttcgcggggggcatattgccgggcagtggcctggactggctccgggcgatctcaacgaaggtcgggacgtgcgcgtgacgacggacatgagggccttgttcaagggcgtgcttgccgggcacctgcggctggacatgagaacactggacacggcggtgttcccggatagcggcaaggtgcgcccgatggatgggttgctggtttagcactcgaaccgtcgagtccaggtcgccgaagatgccgatcggcgggcgttgctggaaaatccctcgactactttgctactcctgccagccgccaccaaccgccttgaaaagcgccaccgcatcctgggccaatgcgccttgcgcgctcagcgcggtctgttgcgcatcgagcatgctcaacgtctccaccagcacgtcgcgctcgctcgccgtgcccagcatctgctcgcgttgcttgcgctgccagacttcctggcggtcgaaggtcgcacgcgccgcgtatgcggcctggcgttgctgataaccatagtccgacagcgcatcctcggtttcctgtagtgcgcccagcacgctctgacggtactgggcaacggtagcctcgtagccggcgcgcgcctgcgccgtttgcgatcgacgcgcaccaccgtcgaacaccgtgcccagcagttgcgcgccgagcgaccaggttcgcagcggcgcatcgagcagatcgtcgacgctgccgccgacatagccaccgttggccgacaaccccaggctcgggaaatacgcggcctgcgcggctcccacctgcgcattggcagccttgacccgtgcctcggccgccatcacgtcggggcggcgccgcagcagttcggccggcatcaccgccgggggcgccggtgcctcgaacccgtattcgggcctgggagccagcacgaacgatgacggtgcctgcccggtgagcgcggccagcgcatgcaggcaccgggcgcgcgtggccgaggccgcttccagtcccatgatgctgctgtccagtgcgttgcgcgtctccaccacgtcgttgggcgaggcggtgccaagctcattcgcccgttcggtcatctccagcagtcggccgttggcatcgacctgattctccagtagcgccatctgcacttcggtctggcgcaacgacagataggtgctggccacggtcgcggcgatgctcagccgttgcgcatgcagatcctgcgccgaggcctcggcctgcgcactttgggcttcggcgcgcctgcgcacggctccccacaggtccagctcccagctcacggtaccctgtgcagtagcttgctggcgcacctgtccctcgcccagcccctgcgcagccgccgtgttctcgctgcggctttgcgaaacgcccatgctgacctgcggcctcccggccgcacggacctcgccgattgccgcctgagcctggcgccacgcggcgtccgctgccgcaatggacaggttggcctgttgcgcgcgctcttgcagctcattgaggtcgggatcgtgccaggcctgccaccaggcctcgccgtaccattcagtcggttccgggtcggcacgcgtccacaccatgccgccctcctcgaaccgttcggggacgggcaggtcgggccggacatagtcgtggcccacggtgcaggccgccagcgccagaggcagtagcgcgctggcgagcaggcgcctgcgagatcgggaaatgcgtgtcatggtggggtcctgcggtggagggtgccgaatcgatccatgagcacatagatcgccggtgtcgaatagagcgtcagcacctggctgagcatcagcccgccgatgatcgccacgcccagtggttgccggaactcggagccgtagccggaaccgatgaccagggggactgctcccaggattgccgcaagcgtggtcatcatgatggggcggagccgcaccagactggcacgcaggatcgcctcctgcggagacagtccctcggcgcgctcgacctgcaatgcgaaatcgatcatcaagatcgcgttcttcttgacgatgccgatcagcaggatcacgccgatcagcgcgatgatgctgaactcgaagccccccgccgccagcgcgatcagcgcaccgatgccggcagagggcaaggtggagaggatggtcagcggatgacgcaggctctcgtagagcatgcccagcacgatgtatacggccagcagcgcggtgacaatcagcaacggcatcgtcttgaccgtgtcggcgaaggccttggcattgcctgcaggcgccgcggcgatgcctgggtccaggtgcagcgcatcgaccgcctgccgtatcgcgcgttgcgccggtcccagcgaagtgccgggactgaggttgtaggacagcgtgacggcggggaattggccttggtgggactgtgacaggctggtcttctgcacgctccagcgcgctattgccgacagtggcaccagctcgctgccgtgaccaggcgtgacgtagatctggtccagcgtcgcggggttgccagcctgcgacgggtccagccccatgaccacgtggtactggttcatttcccggtagatcgtggaaactaggcgctggccgaagctatcgtagagcgcctgatcgatggcctgcgccgatacgccgagccgcgcggcagcgggccggtcgatctcgatctgcgcctcgacgctgccgtccatcaggtcggagctgacgtcggtgatcaacgaaaccttgcgcatggcctgttcgacccgcgcagcggccacatccagggccgcgcggttgtcggccgacaaggtgaactgatattgcccggccgactgccgcccgccgacgccgatgtcctgcacggcctgcagcgtcacttgcacgccggcctcattggcgaaggtcttgcgcaactggtcgatgaccacatccgcgctgtcctggcgcggatcgtgcagcggcttgagcgtgacgtagagcgcgccggcgttggaggcgctgctgccggtagccccgaggacgccgatcacctggtcgacggacggattgccgcgcaacatgcgtaccacttcgctgaagcgatcgcgcatctgcccgaaggagatgttctgcggcccatagacctggcccagcagcaagcccgtgtcctgctgcgggaagaagcccttgggcatgaccgcgaacacgaccagtcccaggccgacgaccgcagcggtagcccaggccatcagccgcgggcgctgcagcgtccagcgcagtgtgcgtccatagaagccatcgggggaagcgccctgcccatcggggtgccgcgcgtcgtccgccggacgcaacagcatgcggctcatcatcggggtgacggtgagcgagatgaccatcgataccagcaccgcggccgcaagcgtgaccgagaactcgcggaagaggcgtccgaccaggccagacatcagcagcagcggaatgaacaccgccaccagcgagacgctgattgagaacacggtgaaaccaacctcgcgcgcgccgtccagcgccgcctgcacgcggctcttgcccatctgctggtggcgcatgatgttctccaccaccacgatggcgtcgtccacaacgaatccggccgcgacgatcagcgccatcagcgagaggatgttcatgctgtagcccagcgcccacatcactgcgaaggtacccagcagcgacagcggcaccgcgaccgccggcaccagggtggcgcgccagtcgcggaagaagaccgctgtcaccgcgatcaccagcaggatcgacaccaccagcgtcagctccacctcgtgcagcgaggcgcggatggtctgggtccggtccagcatcacgtccagcttcatggtggcgggcacggcggcctgcaattccggcagctgcgcgcggacccggtccacggtctcgaccacgttggcgccggggcgcttgctgatgatcagtgccacgcccggccgcccgttcatcaagccgaagctgcggacgttctgcgtcgaatcggtgaccgagcccaggtcggacagccggaccaccgcgccggcgttgtcgcgcaccaccaggtcccggtaggcggccgcctgcagcagatcgtcgttggcggccagcgcgtattcggcgtcgccgacctgcaccgatcccttggcgcgacgcgcattggcaccgttcagcaactgccggatctggtccagaccgatcccgtactggctcagccgctgcccgtccagctccacacgcacggccggcagcgcgccgccaccgacctgcacatcgcccacgccttcggtctgaagcagcttctgctgcagcaacgtggatgctgcgtcgtacagcgcggcactgtcatcggtctgcgaggtcagcgccagcgccatgattggcgcttcggcggggttgaccttgcgataggtcggcacgccgtccatgtcgctgggcaggcggctcatcgcggcgttgatggcggcctgcacgtcgcgtgcggcgccgtccacgtcgcgggccaggtcgaactggatcacgatgcgcaccgagccgctatagctgaccgacgtcatgtcggtgatcccggcgatggcgctgaactggcgctccagtggcgtggccaacgaactggcgacggtatccggatcggcaccgggaaggttggcggtaacggcgatggtggggaattccacctgcggcagcgaagccaccggcagcatgcgaaaggccagcaggcccagcagcatgatgccgacggcgatcagagtggtggccaccggccgacgcacgaacggaccggacagatcgatcgccatggcttagatccgcttggccagggcctgctcggccggacgcagcaacaggtagatcaccggcgtggagaacagtgtcagcaactggctcacgatcagcccaccgatgatggccaggcccagcgggtggcgcagctccgcgcccatgccgctgccgaacgccagcggaacggcgcccagcaatgcggccagcgtggtcatcaggatcggccggaagcgctgctcgcaggcgcgcttgatcgcctcggtaccgtccaggctgtggtcacgctccagctccagcgcgaaatcgatcatcatgatcgcgttcttcatgaccatgccgaccagcagcaccacgccgatggttccgatcacgtcgaactggctgccgctcaacatcagcgccgccagcgcacccaacactgccgagggcaaggtggacaggatcgtcaacgggtggatgaagctctcatagagcatgcccagcaccagatacaccaccagcaccgccgccagcatcagaatggcttggccggacatggcgccgcccaggctgccggccgcgccttccagatgcagcgtgaccgcagccggcaggccgatgtccttggcaatggagtccagccgcttcaccgcgtcgccgagggtgacgccatcggccagatcgaaaccgatatcggcgtaagggaactgcccctgacgctcgaatgataccggcgcgtcccccgcgtcgatcgtggccagcgcggccagcaagacaggggtgccattggtgccgggtacgtggatgcgctgcagcacgtcccgtatgtcctgcaggccgcccttggcggccagtacgacgtggtactggctcaggtcggtatagatggtcgagacctgattctgaccaaacgctgcgtacagtgtgtcatcgatactgcgcatgttcacgcccaggcgcgaagccgcgacccgatccacgtccaaacgtgcctgcaggccccggcgggctgcctggctgtccaccgcagagaacgctggatcggctcgcatggcggccatcagcttcgacgtccactcggccagcaggccacgatcggtggactctaggcctgccgcatagggcatggacgaggactgggtatcgagtgtcaggtcttggaccgggcgcaggtgcagcaccataccggcgcgctgcgccttgtcggcgaggcgtttgatgactgtggcgctggtgtcctttcccgccttcaggcgcacgagcattggcacggtcccgagcgcggtgttggtctggctcacgccggcgctgatggagatgttctccacggccgaatcggcagccaccagccgcgctgcggcctgctcgcgctcttggatgcgcgagaacgcactgtgcgcatcgacttgcagcgcgccctgcagcatgctggtgtcctgcaccgggaacaggcccttcggcagcgcccacaacagcgccagggtcagcaccgtcgcgccggccacggcaagcatgaccgccgcacggcgctgcatcaggcgatccagcaatcgtgcatagccacgctccaggcgcacgaagaaccctgcctcgtcgtgctcggcctccggcttgagcacgcgcgcgcacagcatcggtaccagcgtcagggtcacgcctgccgacaccacgatggccaccgagagggtcactgcaaactcgcggaacaggcggccaaccacgtcgcccatgaacaacagcgggatcattaccgcgatcaaggctgccgacagcgatacgatggtgaagccgacctgtccggcaccttccaaagcggcctgcatgcgcgacttgcccatcgccatgtgccggctgatgttttcgatcatcacgatggcatcgtcgaccaggaagccagtggccacggtcaacgccatcagggtcagattgttgaggctgaaccccagcccatagatgatcgccaccgtgccaagcagggacaatgggacggtgatgcccgggatgatcgtcgctggccagttgcgcaggaatacccagatcaccgctaccaccagcacgatcgcaatcagcagttcgacctgcacgtcgtgaaccgatgcgcggatcgtctcggttcggtcgctcagtatctgcagacggaccgagctgggcagggcggccgacaggctcggcagcgcggcgcgaatgccgtcgacggtcctgatcacgttggcaccgggttggcgctggatgctgatcaggatcgccggcgtgtcgttcgcgtaggccgcctgtcgcgtgtcttccgctccggtggcgatctgcgccacttcgcgcagatacagcggcgcaccatcgtgccaggccagcaccaacgatgcatattcttccggttcgaccaactggtcgttggcgccgatcgcgtaggcgaccgtcggaccgtctatggtgcccttgggaaggttgacgttggcggcggtcagggccgcctcgacgtctgccagcgtcagcccgtggctggcgagctggcgtgtatcgaccgtaacgcggactgcgggacggtggccgccgctgaccgttaccagcccgacaccggacatctgcgagatcttctgcgagatgcgcgtctcggccaacgcctgcacctgcgtcagcggcagcacgtcggacgtcatggcgagcgtcagcaccgccgtgtcggctgggttgaccttgctgtagaccgggggataaggcaggtcgtcgggcaggcgtgcccgcgccgcgttgatcgcggcctgcacttcctgctccacttcctccagcgaggtggacaggccgaattgcagcgtaatgaccgaggcaccattggcactgctcgaccgcatacgctccagtcccgcgatctgtcccagctggcgctcgagcggtgcggtaagggtgttcgcggttacgtcgggtccagcgccgggatactcggtgtagacctgcagggtgggatagtcgacttctggcagtgccgagatcggcaagctgcgatagccgataagaccggcaagcagtacgccgaccatcagcagtgcggtggccaccggccggcggatgaaggtgctggagagattcatggcgtaggttcaacgcccggcttgcgccggcgcgaccacgcgcaccgcaacaccgtcctccagcgcgtcgatgccgtcgactgcgatctgcatgccgggcttgagcgcgtcggcgaccaccacgctttggctgtccagggtcggccccatcgttacgttctgcagatgcgccttgtcgtctttgatcatgaagacataggcaccctggttgccgtaccggatcgccgaaagcggcacgaccatggcgttttccagtgtctgcagatggacccgcgcgctgacgaattggttgggaaacaatcggtgcgcggcatcgttgaactgggcgcgcaacatcaccgttcctgttgcggcgtccacgcggttgtcgatggcctccaggctgccctcggcaagcacgtcgccgccgtcccggcccaacgcatcaacccgtacaggaccttgtcgccgtgcgttgagtacacgggacatctggtcgatcgatagcgcgaacttcaccgtcgtcggcgatacgctcgtcagcgtggcaacgccgttggcatcaccggattgcacaagattgccaagatccaccgcccgcaggcccaccacaccgtcgatgggcgcggtgatccgggtatagctcagctgtacgcgcaggttgtccaccgagcccgagtccgccttgactatgccctcggcctgctggaccgcagtctcttgcgtgtcgagctgctggcgcgaggcggagccaatgtcgaccagcgcccgcgtgcgatccaggtcgcggcgcgcgttggcgagttgtgcgcgatctcgcagcagcgcgccttccgccgtctgcaactgcgcccgcaacgcacgatcatcgatcgtagccagcagatcgccgcgggcgaccacttgtccttccctgaagttgatcgaggccaacgtgccttgtacttgggcacgcacgatgaccgtggtcgatggcgtgacggtaccgaccgcgttcagaaatacaggcacgtcgcgtacggcgatcgctgtggtccgcacgacccgcgatacattctcgtcgccttggcctgcttgacgatgtctaactagtaagctggctacgagaacgatcacaacgagcaaaagggtaagcagcgccacagggcgccaacgtcggactttcactggaataggccacacggaagcaaggaagggagagaaggaagggccgagccccgatcggcatggatcgatgcggggccgttacgaaccttcctcgtcggggcggcatggtacgaacgccgcctgcccaatcggcttcaaactgcgcacatgttgttacattcggttacagccttggtcgaccgtcatggacaagtggctgaaacaaaagggctatttccgagattcatcatgccctgacggtgcggttgcggttgcaaggcaacgcctcttgcgcgaagaatttgtctaacccttcgtgaatggcagactccgtggaagatgcaccgcaccgaatactggtcgtcgacgatgacctggaattgcgcgacatgctgcgccgctatctgggcgagcatcgcttcgacgtacagattctggcttccgccgaccgactcgacgaacgactacggcgtgaacccttcgacgtactgatcctggacctgatgatgcctggcgaggacggcttgtcgatttgccgtcgcctgcgcgcggagggaagcaccgttcccatcctgatgctgaccgcacgcggggcggcggtggacaggatcctgggccttgaaatgggcgctgacgactatctggcgaaacctttcgacccgcgcgagctgattgcacggctgcattcgatcctgcgccggcagtccatggtgaactgcgatggccgctgggccggtggcaacgtcatccacttcgggcccttcattctcaatctgactcggatggaggtgacacgccatggtgaggtactggcgctctccagttcggaatttcagctcttgcgcattatggcgaccaatgccgggcgccccttgagccgcgagcatctgctggagaagctgaaggggcgcgagtacgactcgctcgatcgcagcctggatgtgcaggtcctgcgtctacgacgcaagatcgaggacgacccgtcatcaccacgctacatccgcacggtatggggcgtaggctacatgttcgttgcccaggcctccgaatgaaactgccctggcccaggtcgctactggcgcgtaattttctgctgctgatggttctggcgctggcgctggagttctcggtgttcgcgaccttctaccaactcctgcagaagccccgcagcgaagggctggcgacgcttgtcgcctcgcagatcaacacccaacgcgtcatcctcgcggcactgcctcctggcgagcgcgacgacgtgatccggcggatcaacgccgaaggcgccatgaagatcagccccgccattgaggggaatgcttctcacggggaggagagcggcggcatttggctgaccgattttgcccggcgcctggagagacaactgccgccaggcagccggccggcgatcacgcacctgggcgctgcccatgtacggatgcaggtgggtgatcaggcctactggctatcgttaccgcttcatgtgcagctgcgcgaccgggccatgaccgtcgccgtggccacttcggggctgatcgtcggcctgatgttgctggctgcctggctcatccagcgaagaatcaatcgcccgctacggcagctgcaacgcgcaacccatgccctgggtagcggccgggcgcccggtagactgcccgaagacggacccagcgaactggcagcggtcacgaggcagttcaatcgcatggccgagaacctggaacgcaacgaaggcatgcgtacgctgatgttggccggcatctcgcacgacatccgaacgccgttgaccaagctgcgcctgttgctggccatggaccagctggacgagcacaccgccagcggctacatccagcagatcgatgcaatcctcggccagttcctggacttcggccgaaccgagggtgacgaggcaccgtccatactcgacgtcaacatcctcgtacagcagcttgccgcggaattcggcgagcgtggggacactttcgctctgaatctggaccctgcccttcctacgatgtgcttgcggccgctggcattgcaacgtgccatcgccaacctgatggaaaatgccgtgcgctacggcaagacagggctggccgtagacacgcaggtcggcgatggatgtgtgagcatccgtgttcgtgacgctggccccggcattccgccggaccaggtggagtacctgacgcggccattcacgcgtgccgacgatgcacgctcgaacaacggaggcacgggtctgggtctggcgatcgtggaccgcctggcaaggattcatggcggggatctgcgcctggaaagtccgcctgaaggcggcctgcatgcgaccatcgtgctgcccgttcaggcatcgccgaactgaaggtcatctgtacgcgccaaacctctgtaaggaaatgaaacatctgccttaccgagcgcaacacctctcgcagcagcacttcctagcatggattcatcaggccggatctactccgcctgattccatcaacccaataggagtactgccaaatgcgatccctcattctgacttccttgctggtgctgcctggattggccctggccgcgccgcagttcggcggcgctgatcgtgccaaggccgccgagcagctggaagcgcggttcaagcaggccgacaccgatcaggacggcaagctgacccaagccgaggccgagaggggcatgcctcggatcgccaagaacttctccaagatcgacgccgccggaaacggttacgtgaccctggatcagctccgcgcattcgcccagcaagcggccgcggccggcaggggcaactaagcctcgcatagccagtttcctccccgttcaccggcacacccatctcccggtctctcccgggccggtgaacggggctctcttccttcgcgaggaatcgcccgatgccaaagcagttcacgggtgcggtgcttgcgctcgcatctctcttcctttcagccaagccgatcaacgcgcgtgcgcaagatgcatggtcgtcggacgacgatcacaagatgcatggtctgatcggcctgggcgcggcgtcaatcccggatgcgccgggaagcgatgaccagcgaaccattcctcttcctgtcctgagcctgcgcttctcgggaagtgcgttctacgtgggaaacccgtttggcggatcgccacttcaagccggcgcagcatggaaaaccgatggcggctggcgtttcggcgcaggattttccacccaagccaacgagcctcgcgaagccgacaatcgccagcgagaagcgggtgtggaagacatcgagcgaggcagcgccgcattggtgttcgcgcaatggaactatgagcaggtatcggccacgctgaccggagccaaggcgctgggcgacagcgaacaaggaatgatcgcgacgctccgtctggagcgcgttattaccctgaatcccaggctgcgtatcaccttcggaccgtcggcgacctgggcagatgacgaaaacatgcggacctacttcggtgtcccgcttggcagtaccgaactcgcgcaatacgagccttccggtggccttcaggaaatcgcgatgcaggcggggatcagttacgcggtatctcccaaatggatcctcggcgcgggcctgcggatcgcgaggctgcagtccgaagcgcgcgccagtccgctggtcgaggacgagacccagcgcagcatgtctgcattcctggcacgtcgattctgacggtagatcggagcaagaccggccactcctacttacgccggcgcgtgggaagtgtatgcggatgttgacgcatggtcggtgagcatccttggcagagcgtgcgattcccaccgccggcaccttcaagcgcggcgtccccgcgccgccatttcccctatcccatagcacaggagtcccaccatgtatttactgaaaatcatttcgaaactggccgtcctggccgccgtcgccatccccttcgcggacatcagcagcgcgcacgctgcggttgtcgtagtcccgccgcccgcgccgccggcagcgaccgtcgtagtacggaaaccggcgccagtcgtagtcgcggtgccagcaccgcccgccacagccgtcgttgtgaggaaacccgcgccggtcatcgtctcgacgccaacacacccctcggccgtctatgctcgtacccgtaacttcagcgccgacggaaacggcaatcgcagcgccagtcgctccggcagcgccggcaccatctatggcgggagcgcccattatcaggccaatgcctatcgcaatgccgatggcagcgccgggaggagcgcgaccgcctccgtccaaggggcgaatggcgggcgtgcgagccgcacggccaacggttaccgggatggcgcaggcaatgccggctacaactacaacgcctcggtcgaaggtgccaatgggggcagtgctagtcgcagcagcaacttcgccaagaccgacgatggaagctattccggcagccgcagcactgagatgactggtcgcaatggcaacagctactccggttcgaccgaagtcagcaacggcacgctcacccacaccggcagctgcaccaacgcctcgggtgaggtggtgtcctgccgctgatgcttgtctgggtgccgctgcggggcggattctcctccctctggccgtctccgtagcggcgcccaccttaccgcccttgggaagaaattgcgcgagtttcgggtcctattggccccatcacggccgtccctgcaattctcgtcctttgctccatcggagagcttcatggaaattcgtatcctgctttcccttgctgcctgcatcgcccttaccgcctgtgccaccgcgcccaagccgctgcaaggcacattcacccaagttagcccgcacgatgtggcggccggcgcgcaggccgttgcgcaagtgcgctggggtggcagcatcgtcgaaaccaagccaggaccggactcgacctgcgtgcaactgatctctcgacctctcgacagccatgctcgcccgaaccgcagcacaccggatgcggcaggcggacgcttcgtcgcctgtcacgcggacttctacgatccagtcgtgttcgccccgggacgcgaggtcaccgtcgtgggcacgatcgaaggtactaccacgaccaagatcggcgagtacgactacacattgcccagagtcaatgccagcgtgatttatctgtggcccgaaacgaaggaagcgcgcgtggtctatccatatccctactacggtcctgtctggggttaccgcggttggtggtggtagacggtaagggaaagcgccaagacatcaaaatggcctttgattccatcaactgtcgaaggtggcaagcatgtatgcctacgagacgatgccgctgaattccaatgaggatgacatgccggttgttgaattgatcatcgcattgaaggcatcgagtgatcgcatagaggaaatgcgtgacgtgctgcaggcattacgcgaggccgccattcaagatccaggatgtctggactatcgcattgcccgaggaagcctatcggaaaaccgatttttcctgctggagcgttgggtcgatgccgaggcactgttccgacacgagcatacgccgtacttcttggatggagtggcgcgcgtgcgagcatgctgtgaatccgtggattttcagccaattacctggttggaatgagcgaacgttatggagcttcgccatcttcgttgcttcctggctgtcgccgaagaattgcacttcgcccgtgcagctgagcgcctgcacatcgagcagtcgccattgtcacgcgccatcaaggagctggaggaagaactgggcgtggcgctgttcgcccgcaccacgcgcagcacgcgactgacccgtgcgggcaaactgttcctggatcacgtgccgcgcgtgttcactgctttgcagcaggcgcgcgacagtgcgaaggccgcggccaatggcttccacggccagttgcgcatcgccctgtccgacggcattacgccgtcgcgtctgccggccttgctggcgctgtgcaggcaggaagaacccgaagtcgaaatccgcctgaccgaggtgccgctgtcgcagcagatcaagggcctgcacgacgacctgtacgacgtggggttcgctcgcgccgacgaagcaggtgacggcatcgtagcgatgcctgtctggaacgatccgctgatggtggccgtgccggcccggcatgacctgctcaggtacaagcggattccgttggaagaagtgctgcgcttcccactggtgctctgcgacccggtggcgtgcgaaggccacgcgcgacaagtggatcgcctgctgcgccgcgtggacatggaaccgctggtggccgagcgggtggcgtcctgcgacctgatgatggccttggtatcggccgggttcgccctagggctgacgggcgcagcgcacatcacggccagccgcgaacaaggcgtggtcgcacgggcgctggcgggatgttcgcccgtgctcaccacctatctgctgcgcctggatgccgaaccatcggagacgctggctcgcttcatcgagcgcgtgcaggccatcgactcgcccgaggccgccaggccgacgccaggcgatgaacccgatgtcccggaggaatccgaaccatgaagaagaccattccgttcctgctggctgctgcggtgctgacggcctgcggccccactgacacgccagagaagacggacgcgcccagcgttgaagaactggcatccgatcccgtgcggctgaaagaactgcgccagcaatgcaagacggatcgccccaagctgggcgacgtgctttgcaatcgagtcgccgaagccacgcgcaagcggttctatggcgacggcaatacgccctacacgccgccggagagtccgccgaagttctgaccgtgggtgctccaccacgaaacctctgcttttctgctcgacacgccgcagcgcgccttcgcttgcggcgtttttctttggcgcgatgcagccccaattctttccgattactcgacctttctcccgataacggtctttgaccggcaccgacccggcactgatcctcacttcatgcggcacgtccttgtgctgcgcgtgaacgaggaatcagcgcagaggaaatcggaggccagtcatgcaaggtcagggcgtgttgttcgggcagatcgccgccgtcttcggcatcgtgatcgccggtgtgtggggtgccacacaatggacagccgccgccctgggctatcaactacgccttggctcgccctggttcgatttcttcggaacgccggtctatcacccctggcggctgttcgagtggtggttcttcttcgatgcctacgcgccgcaggtcttcgacatcggcggggccttcgcgggcggcagcggcctgctggccgtggtggtggccatcgccatgtcggtgtggcgctcgcggcaggccaagctggtcacgacctatggttcggcgcgctgggccgaagccgacgacattcgcaaagccgggctgacgcagccggccggcgtcttcctcggcaagtatcgcaacgagtatctgcgacatgaaggcccggaacacgtcctgaccttcgcgcccacgcgctcgggcaaaggcgtgggcttggtcgtcccgacattgttgtcctggccggcttcggccgtcatccatgacatcaagggcgagaactggcagatcaccgcaggctggcgctcgcgcttctcgcactgcctgctgttcaaccccacggatgcgaagtcggcggcctacaacccgctgctggaagtccggcgcggcgcgcatgaggtgcgcgacgtgcagaacattgccgacatcctggtcgatcccgaaggcgcgctggagaagcgcaaccactgggagaagacttcgcacgcgctgctggtcggggccatcctgcatgtgttgtacgcgggcgaggacaagacgctgcgaggcgtcgccaacttcctgtccgacccggccagcccgttcgagctgaccttgcaccggatgatgacgacgaagcacctgggcgatgcaccgcacccggttgtcgcgtccgctgcgcgcgaagtgctcaacaagtcggataacgagcgttcgggcgtgttgagcaccgccatgtcgtttcttggcctctaccgcgaccccacggtggccgaagtcacctcgcgctgcgattggcgcatcgccgacctgatcgcatccgagcatcccgtctcgctgtatctggtggtcccgccttcggacatttcgcggacgaaaccgctcattcgcctgatcctcaaccagatcggccggcgcctaacggaatcgctcgacggcagcgacggcatcgcgcgccgccacaagctgctgctgatgctcgacgagttcccggcgcttggcaggctcgatttcttcgagacggcgctggccttcatggcgggctacggcatccgcagcttcctcatcgcgcagtcgctcaaccagatcgacaaagcctacggccagaaccattccatcctcgacaactgccatgtgcgcgtgacgtttgcgaccaacgacgagcgcaccgccaagcggatctccgagacgctgggcaccgccaccgaactgcgtgcgcagcgcaactacgccggccaccggctcgcgccgtggctgggccacctgatggtgtcgcgccaggagacggctcgcccgctgctgacgccgggcgaagtgatgcagcttccgcccgacgaggccgtggtgatggtgtccagcgtggcgcccatcaaggcgaacaagctgcgctactacgccgacgccaatttcaagcggcgcgtgctgccgccgccggcgctcgcagccgggcagtacgccgatgcgccgccctcgcggccggatgactggagcggcctggcgattcctgccgtgcccgacgcccctgcaacgacatccgccgatggcctgggcaccgccgacgacggcggcccacgtcgccagcccgagctatccgaagtcgccgaatacagccccgagccgcagcacgcaggcaacgacctggcgctgctcgatgacgacgacgacctgccgctgccgcttcccggccagctcgacccggccatgcagcgcacggcccggctggcatcgctgaatcccaacgacggaatcgaactatgagccagtaccgcctcaacctgttcatccagcccgaacatgccaagcgcctcgaagaactggccgccaagaaaggcgtctcgaaatccagcatcgttgccgccgccctggcgtcctggctatcgccggatgccggcgaccagcgcgaggcggccatcgccaggcggctggatcgcctgtcgcgccaggccgaacgcctggagcgcgaccagaacatcgaaatcgaaacgctggcgctgttcatccgctacttcctgaccgtcagcacgccgattcccgaagcccatcaggacgcggcccgcgcgcagggcaaggcgcgcttcgagcagttcgtggaacagcttggccgccacctgctgcgcggccgcagcttggtgcgcgacgtggtggaagaactgcaccctgacccggtgcggatggaggatgcggcggcgctggccgaggcgcgggagcgtgcgtcatgagcgccgcaccgaagtcatccaccgccgctgctctggatcgccgcatccagatgctgcgcacggcaatggggccgctgatcgccaccgcgctggaagaccccgacgtggtggaaatcatgctcaaccccgaccgcaccctatgggtggatcggctgtcgtcgggccgcgccccgctgggcgtcgaactgtccgaggccgatggcgaacgcatcatccgcctggtggccgcgcatgtcggtgcggaagtgcatcgcggccagccgctgctgaccgccgagttgccggaaaccggcgaacgcttcgagggcattctgccgccggccgcgcccggcccggccttcgcgctgcgcaagcgggccgtgagcatcatcggcctggatcgctacgtggtcgacggcatcctgtccgcgccacaggccgagttcctacggcgggcggtacgcgaacggcagaacgtgctgatcgcgggcggcaccagtacgggcaagaccacgctcgccaatgccttgttggccgagatcgccgccaccggcgaccgcgtgctggtgctcgaagacaccatcgaactgcaatgcgcggcccgcgaccacgtgccgctgcgcacccgcgccggcgtcgtgtcgatgcaggaattggtgcgcgccacgatgcgcctgcgccccgaccgcgtaatcgtcggcgaggtgcgcggcggcgaagccctggacttggtgaaggtgtggggcaccggccaccccggcggtatcgccaccatccacgccggttccgcgctgggcgcgctgctgcgcctggaacaactgattctcgaagtggcggtgaacccgccgcgtgcgctgatcgccgaggcggtcaacgtcgtgatccacatcgccgggcgtggccgcaagcgccacgtcgaaagcatcgcccgcgtcgtcggcttcgacgccgccggctaccaactggcggacgcgctggaaacgccgtttcccgagctgccgccggtttccctcgcagccgccgccgctgcgccttccccgtccctcgacccacttggagaactgccatgacgcagatgcacgttcctgctttccgcctttccgtaaatccggttcccatccttgcacgcctccggcgcctggcccggccggcccatcgcggcctgctgctggccgccatcatgctgatgacggccggcaccgcgcaggctgccggttcctcgatgccctgggaagggccgctgcaatccatcctggagtcgatccaggggccggtcgcgcgcatcgtggccgtcatcatcatcatcgcgaccggcctcgcgctggccttcggcgacacgtcgggcggcttccgcaagctgatccagatcgtgttcggcctgtccatcgcgttcgccgcatcctcgttcttcctgtccttcttttcgttctccggcggggccgtcgtatgagtgccgccgatgaaggcacgccgggcttcgcgctcggcttcgaggtgccgctgcatcgctcgctgaccgagccgatcctgctgggcggcgcaccgcgcaccgtggcgatcgccaacggcacgctggccgctgccgtcgggctgggcctgcaactgtggattcccggcgtcgtgctctggatcgtcggccactcgctggccgtgtggggcgcgcgcgtcgatccgcagttcatgcaggtcttcgcccggcacatcaagcaccgcccgctgctggacgtgtgaggggatgccgccatgctgaaccttgccgaataccgccagcgacccgcgctgctggccgactggctgccctgggccgggctggtcgcgccgggtgtcgtcttgaacaaggacggcagctttcagcgcacggcccgtttccgcggccccgacctcgatagcgccacgcagggcgagctgatcgccaccaccgcacggctgaacaacgcgctgcgccggctgggttcgggctgggcgctgttcgtggaggcagaacgccagccggcggcggactacccgcattccgacttccccgaaccgctgtcgtggctggtcgatgaggaacgccgcgcggcgttcgaggaatcgacccaccatttcgagagcgcctatcacctgacgctcgcgttcctgccaccggaggaatcgcgcgcccgtgccgccaggctgctctatgagaacacgcccggcgatggcgtggactggcgcggccggctcgacgccttcgtagcggaaaccgatcgcgtgttcgatctgctcgatggcgtgatgccggaagtcgcctggctcgatgacagtcagacgctgacctacctgcatggcacggtatccacccggcgctatcgggtcgcggtgcccgaggtgccgttctatctcgacgcgctgctggccgactccatgctggccggcggcctggcgcccacgctgggcgaccagcacctgcgcgtggtgacggtgcggggctttccgacctcgacctggccgggactgctggacgacctcaatcacctggggttcgcctaccgctggagcacgcgcttcctgtgcatggacaaggccgaagcggaaaaggaactcggccggctgcgccgccagtggttcgccaagcgcaagaacgtcatcgcgctgctgcgcgaaaccatcttccagcaggaatcgccgctggtggataccgacgccagcaacaaggcggccgatgccgatgccgccttgcaggaactgggcagcgatcaggtcgccttcggctatctcaccgccacggtgacggtgctcgacgccgatccggccgtggccgacgagaagcagcggatggtggagcgcgccatccagggccgaggcttcgtcaccatccccgaaaccctcaatgccgtggacgcctggctgtcgtccatccccggccacgcctacgccaacgtgcgccagcccatcgtctcgacgctgaatcttgcacacatgatgccgctgtcggcggtatgggccgggccggagaagaacgaccatctcgacggcccgccgctgatcgtgacgcgcaccgatggcgcgacgccgttccggctggtgacgcacatcggcgacgtggggcatacgctggtcgctggcccgaccggcatgggcaagtcggtcctgcttgccgtcctggcgatgcagttccggcgctacttcagctcgcgcatctttgccttcgacatggggcggtccatgcgggcgacggtgttgggcctgggcggcgagcactacgacctcggtgccgatggcggcatcgcgttccagcccttggcccgtatcgacagcgagggctatcgcacctgggcggccgagtgggtggaaggccgcctgctgcacgaaggcgtcaccgtcggcccggacgagaaggccgccatctggtcggcgctggggagcctcgccggtgcgccgccggagcagcgcacgatgacggggctctccgtgctgctgcaatccaacgcgctgcgtcaggcactctcgccctacgtgctcggcggcgcccacggcaagctgctggacgccgacctcgaccggctgggcagcgccgacgtgcagggcttcgagatggaggagctgatgcacagcccggccgccgtgcaagcggtgctgcgctatctgttcgcccgcttcgatgaacggttcgacggcgcgcccacgctgctgatcctcgatgaagcctggctgttcctcgatgaaccggccttcgcggcgcgcatccgccagtggctcaagacgctgcgcaagaagaacgtcagcgtcatcttcgccacccagtcgctggccgacatcaaggactcgaccatcgcgccggcgatcatcgaaagctgcgccagccgaatcttcctgccgaacccgcaggccaccgagccgcagatacggacgatctacgagggctttggcctcaacagccggcagatcgagatcgttgccaccgccgagcccaagcgcgactactactaccagtcgcgcctgggcaatcgcctgttcgacctcgacctggggccggccgcgctcgcgttcgcgggcgcttcgaccccgcaggaccagcgcgacatcgaccgcgtgctggcgcaagccggcgtgcccggttttgccggcgcgtggctgcgccatcgcggcctcgattgggccgccgacctgctggccgagttccccggcgccgcgccattggccccttccgtcctttccccaccaccacaggagaacctgccatgaagaagcgtcttatcgccaccgccatcgcggccatgctttgcaccgtgtccaccgcgcaggcgcaatgggtcgtggttgatcccacgaacttggtgcagaacacgctgaccgcgatccgcacgctggagcagatcaacaaccagatccagcagctccagaacgaagcacagatgctcatcaaccaggcacgcaacctggcgagcctggacttcaacatcgtcaaccggctgcgctcgacgctggcgacgaccgagcggctgatcgccgaggcgcagggactggcctttgatgtgcagaacctcgaccgcgagttcgcacgtctgtacccggagcaatacgccgccaccgtcagcggcgaccagatgtaccgggatgcgcaggagcgttggaagcacacgctcgacggtctgcatactgcgatgcgcatgcaggcgcaggtatcgcagaacctgcgcgaggacgaatccgcgctggccgacctcgtgagccagagccagtccgccaccggcgccttgcaggccgcgcaggcgaccaatcagctcctggccttgcaggccaagcagtcgatccaggcgcaacagctccagatcacccaggaccgcgcgacctcgctcgaactggcgcggcaggcggcggccaccgagcgcgcccgcgaagtgcgccggcgcttcctcggcaccggcacgccgtacacgccgcagcgcgtggatttctaccgcaactgacgggagacggccatgcgatgcgcttgcctcctgctggccgtgctgctgacagcctgcggccagcactcggccgacaaccgcgccgatgccctggccgccgatcccgtgcggctcaaggcactgcgcgcgcaatgcgcggccgaccggcaggccgtcggcgaggacgcttgcctggccgccgcagaagccttccgccggcgcttcttcgccggccaaaccgggccggacgagtaccgaacgctggaggagctgccgcccattcccccaaccttcgatgagccgattggagatgaaacgccatgaacgacgtgacgatcatcgaccgctttctggatacgttctcgcgctacatcgactccgggttcgggctgttgcagggcgaggtggcgttcctgacggccacgctgatcgtcatcgacatgaccatcgccggcctctactgggccatgagccacgccaccggccaaggcgaggacgtgatcgccaagctgctgcgcaaggtgctctacgtcggtgccttcgcctacatcatcggcaacttcaactggctggcaggcatcgtcttccggtccttcgccggcctgggcctgacggccaccggctcgaccttgagcatggagaacttcctgcaaccgggccggctggcgaagaccggcatcgacgcaggcacgccgatcctggagcaggtcggcgagatggctggtttccccgaggtgttcgtgaaccttgacgccatcacggtgatgttcctggcctggctggtggtggtcctgtgcttcttcgtgctggcgatccagcttttcatcacgctgatcgagttcaagctgaccacgctcgccggcttcgtgctggtgccgttcgccttgtggaacaagaccagctttctcgccgagaaggtgctgggcaacgtggtgtcggccggcatcaaggtgctggtgctagccgtgatcgtcggcatcggctcgggcctgttcgccgagttccaggtgcatcccgacgagccatccatcgaccacgcgctggtcatcatgctggcctcgctgacgctgctggcgctgggcatcttcggccccggcatcgccaccggcctggtgtccggtgcaccgcagctcggtgcgggggcgatggccggtgccgctgtcggcgctgccggcacggccgtcgccatcggtgctgccgcaaccggcgtgggcggggcggtggccgccggggcgcgcatggcgcctgctgccgccaagctggccggcagcggtgcgcgcgccgcgacatcaacggccggtggtgcccggtcagcgttccgggccgggtccgccgctgccggcggcggggccaagggcgctgcggccggcctgggcaacgtcgccaagacgggcgcgcaggcggccgggcgcggtgccgcatcccgcgcttccgccatcgggcaacgcatggctgcgcctttccgcgccggctggaacgggccgccggccgatgaaggcgcaggcgccgcgtccggcggcggccagtccggcggcgaagccacgtccaacaccgggcagcaaccggcctgggccaagcggctgcaccgccgccagcagctcacccacgccgcgaccaccgccgcccatgcgctgcgcggcggcgacggcggcggctccgggcaaggcccgagcctgcgcgattccgattcctgaccttcaaggagaacacccatgcgattcaaacgaccgcaggtgcgctatgccgacacgccgcagcctgccacgccgtatcaatctgccgcgcaggtgtgggacgagcgtatcggcgcgccccgcgtgcaggccaagaactggcgcctcatggccttcggcctgctggtgctgacgctgctgatggccggcggcctggtctggcgctcggcgcagtccatcgtcacgccctacgtggtggaggtggacaaggagcacgtgcgcgccgtaggcgaggcggccacgccgtacaagcccacggatgcgcagatcgcgcatcacctggcgcgcttcgtgacgttggtgcgctcgctgtccatcgacccgatcgtggtccggcagaactggctggacgcctacgactacgcgaccgaccgaggcgccgccatgctcaacgactacgccagcaagaacgatcccttcgcgcgcgtcggcaaggagtcggtcacggtgcagatcaccagcgtcgtgcgcgccagcgacacgtcgttcaacgtgcgctggaccgagcaacgcttctccaacggcgcgccggccggcaccgagcgctggaacgccgtcatctccatcgtcctgcaaaccccacgcaccgaggagcgcctgcgcaagaacccgctgggcatctacgtcaacggcctgtcgtggagccgcgaacttgatccctcggaaggaacgaaaccatgaacactctccaatcgcatgatcccgtttcgcgtcaggatgatcttcccctcgatgagcggtggcggatgtctcaggaggcgtatcagcagcgtctgcgggatggcgtcgtatcggtatggcccttgttcgccccgaatctgcggatagacgatcgaacacttcgccacgtttgcctgttgacgctggtggcggccttggcgggctgcgccacacagggcaagccgccgcccgtgatcccactcgatgagccagtgcaggcgcagctcgtgcccgatccaccctcgccggtggaggtggtcgccgtccccgaaccgctggcgctgccggagcagttgaagccgctgccggaaggtgacgaagcccagcccgggccggagccggccgacgaaaccgtgcgcgtgtccaaggccaataccgaggcgcgggtcgcgcccacgcgcgagggctacgtcaatgccatccaggtctggcccttcaccgatggcgcgctgtatcaggtctatgccgcgccggggcgcgtgaccgtggtttcgctccagcccggcgaagaactggtgacggtcgccgccggcgataccgtgcgctggatcgtcggcgacacgtccagcggtgccggcgacgagctgcgcgtcaacgtgctggtcaagcctgtccgctcgggcctcaagaccaatctggtcatcaccaccaatcggcgcacctacctgctggagctgacctcgacagagcgcgcttggatggcgtcggtgtcgtgggactacccgaaggaccggatgctggctttgcagcgccaggcgcaggccgcgcaggtggcggcgccggttgatacgggcctatcgctggagcgcatccgcttccgctacgcgatcagcggcagcaatccgtcatggaagccgctgcgtgccttcgatgacggcgagaaggtctacatccagttccctgccggcatcgcccagggtgaactgccgccgctgttcgtcatcggcgtgcagggcgatgggcagttggtgaactaccgcttccgctcgccgtactacatcgtggaccggctgttcggcgcggccgaactgcgtctgggcggcgacaagggcgacgtggtgcgcatcgagcgcaccgacggcgtggcgcggaggaactgatgatgcgccaggacgacacccccgagccggtcgcaccgcaggcggccaaggcagcgcccgaggcggtagcgctgcgcgcccagccgcgtccggtcacgcgcttgaatcgtcgcatgctggcgatcctggccggcgggctgtcggtcgccgtgctgggcgcgctgatgtggtcgctgcaaccgcagcgacacggcgccagcgaacagaccgagctttacaacgtcgatcgcgtttcgcgctccgaagggctggagcggcttccgaccgactactccaagctgccgccggccgcgccgtccccggtgccggagctggggccgccgctgccgggcgacctcgggccggccatcgtcaatgcgcagcaaccgacaccaggttacgcgccgcccggccacgatccggccgaggccgagcgcctggcccggttgaaggaagccgaggaagcggcggcgtcatcggtgttcttccgctcgggtacgcagcgcgccgcgccggtggcgcagtcacaggccaccgtggcgccgggcttcgccgccaatgcggcgttcgatccgatggccgccgggccggcctcgacggcagcccagcctgccgacccgaccgcagtacagaaccggcaggaacagaaggaggcgttcctgcaaggcggttccacgcaaacccgtaattccggcaacctgcaattgccagcctccccgtatcaggtcatggccgggacggtcatcgccggcgcgctggtgacgggcatcaagtcggacttgccgggcgatgtcatcgccacggtgacggagccggtctatgacacggccaccggcaagttcctgctgatcccgcagggctcgcgcatcctcggtcgctacaacagccaggtgagctacggacagagccgggttcaagtcgtctggaaccggatcattctgcccgatacgtcgtcggtgacgctcgacaacctggtcggcaccgatccggccggctatgccgggctggaggatgaagtcgattggcattgggatcggatcttcgccggggcggcgctgacgacgctgctgggcgtcggcgccgagctggccgcgccggagaaccgccaggacggcaaccgcatcgtcatcgccggccgcgacagcgcgcaggacagcatcaaccaggtcggccaggagatgacccggcgcaacatgaacatccaaccgacgttgagcgcgcgccccggtctgccggtgcgtctggtcgtgagtcgggacttggcgctgcgcccctaccagcccctgttcttcaaccgagggacttcacgatgagcacgaccaggaagctgcggttgggaccgctgccgaagaccgagaacatcaagctgacctttccttgcccggccagcctgaaagccgacctcgaccgctacgccgcgctgcatgcgcagacctatggcgaagcagtcgatgccgtgacgctgatcccgcacatgctcgaagccttcatcgcgggggaccggggattcaggaagggaagcgtgagcaggacggtgccagcgaagccgggctgacgatgcacggtctcgccggcggccatccctcgaatgcgcagcccaacgctgcgcgttcttcgttctggaggatggcgacagagtgggctatgatcgtgcggcaagcccgccgtctgccggtgatcgtccccgatgcagcacgacttggccctctaccgcgacgctcccatgtggctcctagtccatatggccgccgccccgcaaagcggcccgaagtagagctaactccctgtcttgtttaagctttcggactcttggcgattttcgccgagggcttgacacaggcccttttttgtgcgggcgctgctggaaatcgaattgtagagccgagcccgtgctcggctggtcatgaaccccgacaagtcgcaggcaagaaaaaagccgagcatgggctcggctctacaggagggccctggcctacgcgtcagtcttcgacgcgcagcacggcgcccggcttcagcacgctgctgccgctcaggccgttcagcgacaacagggccttgaccggcatgccgtagcggcgggcgatggtccaggccgactcgccatcacgcacggtgtggcggcggctgcgcggacgatcagcgatcgcggcgacggtcttggccacctgcggcgtcggtgctgcggtggcgaccggcgcagcgctggcgaccagggcggatgcggtgtccgccaccgtcgcattggcagccgagacaggagccagcacgcgggtggtacccgacgaggcgcggccaccgcccgccagggcgggttgaggcgggcgatcctggccgggtccagggcgcgctgtgcggcccactgctggacgctggtgccggcgggcagggtgtggtccttcagcaccggcacggtgcggtccagcgaggccatcacgcccggctggtcttccacgtcttccagcacgcaggccagggcatgcagcttctcgacgtaggcatgggtgaccggcgacaggccgggcagcgccgacggcttggcgttctgcgcgttcatgccggccttgcgcatggactgcaacacgcggtactcaccggcgttgtaggccatggtggccaggcgccagtcgccgccgaacatgccgtgcagggtcttcaggtagcgcactgcggcctgggtggaatcgaccgccgacaggcggccgtcgtagccgttggccatgggcacgcggtggttgcgcgcggtggtggcgatgaactgccacaggccggtcgggccgctgccattgcgggcattgggccggtagccgctttccacgaacgggatcagtgcgaattcggtaggcaggttggccttgcgcagctcttcaaccacgtagccgaacagcaccagcgcatcgtcatcctggttggccaggcgcgacggggcgtgggcgaactgcttctgccagcgcgggctggtggcctcggcattgcaggtgggctcggccaggccgtcgcggaagctggagaagatctcctggccattgcggaccgacgcggccggcaacgcggccggatccagcggcagggccgccgcggcggccaggttctggccgatgcccgcgcccagcgactgggcaccggcggttccggccagccccaggaccaggcccaaggccagcggcagacttcggcgcatcatgcgcggaagccgtctttccagtgccggagaccggccatgacgtcgacgtcgtcaacgacgtcgcggcccaggtgcgccgacactgccgcgcggatcggcgccgtgtgcacacgcaggaacggattgcagtcgaattcgttggccagggttaccggcagggtggaacggtcatcgcggcgcatggccaaagcctcctcttggcgctgccacagggcagcgttggcggggtcgacatgccgcgcgaagacggcatttgacacggtgtactcgtgggcgcaacaaagcagcagttgcgcgggcaaggtacccagcttgcgcatcgatgccagcagctgggacggcgtaccttcgaacaggcgtccacagcccaagctgaacaacgaatctccgctgaaaagatgttcagcagtgtgaaacgcgatgtggctgcgggtatgcccgggcacggatagtacgtggaacgtccggcccagtgcctgaacgcgttcaccttcgccgacccgctcggtcgctgcagggatgcgctcctcgacgggcgcgatgacccgtacaccgggaaaacgtgcctgcaacgcgggcacgccaccgatgtggtcatcgtggtgatgggtgagcaggatcgtgtccacgcgcaggccctgatcggccagcgcaagcaccggcgcggcatcgccgggatcgacgaccacggcggcgccagcgtcgtcgatcaacgtccagatgtagttgtccgcaaatgcgggcagggcagtcagtcgcatagaattggaccatgcccgcgctgcagagcacccgtcaagcgagccaggccccgtggttcgacactgaaccggcgggctccttgcgcgtgctggagcggcagttgctgctgccgcagctgtccgtcctgccgacgcagccttggctgtggatcgcaccgagtgcggcctggctggaggatgcgcagctgggcgggcgcgggctgcggctgttccggcagggccagggctatgccggcgacacccgctgtgcgctgccgctgccgctggccagcgagagcgtcaacgcggtcgtgctgcagcatgtgaccgcgggcgatgcggagcgactgctggacgagtgcgagcgcgtgctgatgccgggcggccacctgtggctgagcagcctcaacccgttcagcccttaccgcacgcattggcgccagcacggactggtggtgcgcacgccacagcggatccgcctgctgctcggccgccacgggctggagtgcgacgatatgcgttacctcggcccgctctggcgcggtgcaggcagtcgccgcacgggcggttgggcgccgctgcgcgcggcctgcctgttccatgctgaaaagcgcacgctggccctgcccgggccgaaaccgttgccggtgcgttggctcggcaccgttgccacctgatctggagttgtattgaaaaccatcgaaatccacaccgacggttcctgccttggcaatcccggccccggcggctgggctgcgctgctgcgctacaagggccacgagcgtgaactgagcggcggcgaagcgcacaccaccaacaaccggatggagctgatggcggccatttccgggttggagacgctcaccgagccctgcaacatcgtgctctataccgattcgcagtacgtgcggcagggcctgacgcagtggctgcccggctggatccgcaagaactggaagaccgccggtggcgacccggtgaagaaccgcgagctgtgggagcgcctgcatgccgcgacgctgcggcaccagatcgactggcgctgggtaaagggccactccggtgacccggacaacgagcgggtggatacgctggcgcgcaacgcggccatccagatccgcgacgccagcccggtaaactgagcccatgcgtcagatcatcctcgataccgaaaccaccggcctggaatggaagaagggcaaccgcatcgtcgaaatcggctgcgtggagctgttcaagcgccgcccgaccggcaacaactaccaccagtacatcaagccggactgcgagttcgaacagggcgcgcaggaagtcaccggcctgaccctggagttcctggctgacaagccggacttcgcgcagatcgccgatgagttcctggccttcatcgatggcgccgagctgatcatccacaacgcggcgttcgacctgggcttcctcgacaacgagctgtcgctgctgggcccgcagtacgggaagatcaccgatcgctgcacggtgatcgataccctggtgatggcgcgcgagcgcttcccgggccagcgcaattcgctggatgcgctgtgcaagcgactgggcgttgacaactcgcaccgtgcgctgcacggcggcctgctcgatgcgcagatcctgggtgacgtgtacatcgcgctgacctcggggcaggaagagatcggattcggcctgggggatgacgatggcggtggcgccggtgcggcgctgcaggccttcgataccagcaagctgctgccgcgcccgcgcgtaatggccacgccgtcggagctggaagcgcatgccgcgcggctggagcggctgcgcaagaaggccggccacgcactgtgggatgggccgaaggtggaagaggccgccagcgcgtaatgcctggaagaggtagtgccggccgctggccggcatttgcgtgaacacgtttcccggtgagccggccagcggccggcactaccgcctccacgcatggcgtggatctacgggttaatggcagcgcaccaggatcacgctgatgttgtcgcggccaccgccgtcgagcgcggcggcgaccagcgtgtccacgcattcctgtgcgcttgcatcctcgaaggcgagggtgcgggcgatgccgcggtcgtccacttcctcggtcaggccgtcactgcacagcagcagctgcatgccggggcgcagctcgccgctggtggtggccacgttcagatgtgccggatcggtgacgcccagcgcctgggtgaccacgttgcgatgtggatgcgcgcgtgcctgttcggccgtcaggttgccctgcgcgaccagttcctgcaccacgctgtgatcctggctgagctgtgccagctggccgtcacgccagaggtaggcacggctgtcgccgacccatgccacttcatagcgattgccctgcacgcgtgcggcgaccacggtggtacccatcggcagggtgtcgttgcgccgccgcgaggcgcggatgatctcttcgtcggcggtgcggatggcctgggccagcggcgcgccacggcggatctcgcgcacgatggtttcgcgcgccagcgcgctggccacctcgccgcaggcgtggccgcccatgccatcggccaccagccacagggccagctcgctgtcaccgtagtaggtgtcttcgttgagctcgcggcgcaggccggggtgggtgaggtgtccgaattcgatcatggtgtgcaggggcggggtattgctggggagacaggcatcatcggggggctgcgggcatccggcaaggcatgcatccaggaaattttcacttcattgaccggaatgacttgtcgtcggcctgacttcctcgtatgatgcgcgtccccggtccgccggggaccacccggagaggtggcagagtggttgaatgtacctgactcgaaatcaggcaggcgtttatagcgcctcgggggttcgaatccccccctctccgccagataaagaaaaagggctgccgaaaggcagccctttttctttatctggcgcgggacgcgacgcgctctgcgcgtcgccccacacgttgctgcgcaacgcgtgggcccctccctttgccggcctctccccgcccctgtcggggcagcccctcaacagaggggcttggtcctccagatgcatcactgagatccgcgcggtgcgtggatgcgcggcgggcatcacgccgtagtgaccctgtactgatctggcgcgggacgcgacgcgctctgcgcgtcgccccacacgttgctgcgcaacgcgtgggcccctccctttgccggcctctccccgctcctgtcggggcagcccctcaacagaggggcttggtcctccagatgcatcacgggagatccgcgcggtgcgtggatgcgcggcgggaatcacgccgtagtgaccctgtactgatctggcgcgggacgcgacgcgctctgcgcgtcgccccacacgttgctgtgcaacgtgtgggcccctccctttgccggcctctccccgcccctgtcggggcagcccctcaacagaggggcttggtcctccagatgcatcactgagatccgcgcggtgcgtggatgctgttcctgctggcaggctcatccacgcatgacgtggatctaccggggatatccgtgcggacgctgcgggttaccatgtacgcatcacctgctggagcttttccccatgaccgctgaaatcctcgttcccgtttctttcggcgagctgctggacaagatttcgatcctgcagatcaagtccgagcgcatcagcgacgagggcaagctggccaacgtgcgcagggagctgtcggcgctggagcagacctggatggcacacccggcggccgtgaaggacatcgccaggctgcgtgccgagctgaaggtggtcaacgagcagctgtgggaaatcgaggacgacatccggctgaaggagaaggcgcaggcgttcgaccagggcttcatcgacctggcgcgcagcgtgtacctgcgcaatgacgaacgcgcgcgcatcaagaaggcgatcaacctggcgctgggctcggcgtacgtggaggagaagtcctatcaggattacgcgcagcgcgtgtaatcccgggcggcctgccgctcaccccaggtggtcggcgacgtagcgttcgaaggcagcgataccgtcttccacggtgatcagttccatcacatcgtcgaactcgatcttggtgccccacttcagatcggtggcctgcttggcgaggtatttgcgtgccgcatcgtcgtagcggtccacgcaatagcgacgatccgagtacgggccgctgcggttcggattgctggccgcatgcaggcccagcaccttggcgcccatcgcgttggcgatgtgcatcgggccggaatcgggcgtcatcaccaggttggcgcgggccagcagggcgggcagctgcttcagcgtgtccttgcctaccaggtccagcgccggcgtgtgcagctgtgcctggatggcgtcggccatgctgcgctcaagttcgctgcggccaccgcacagcaccacctgccagccgcgcgtgaccgcgtggttggccacggcggcgtagcggtcggcgtaccagttgcggcgcacgtggctggagcagggcgagatcatcagcaccgggcgaccatcgtcgcgccattgcccggcggcccactcatatgcggactgcggcacggccaggtcccagctgacctcggtctggcgcaggcccagcggttcgcagaagctgccgatggcatcgagcacatggatgccgggacggtcgggaatgcgttcgttgatgaaaagcccatgcaggtccttcgagcggctgcggtcgtagccgatgcggcgctcggccggaatgaaggccgacagcaggttggcgcggaacgcgacctgcatctgcagcagcgcttcgaagcgccccggcggcagctgcctgcgcagttccttgaccccggccatgccgctcttcttgtcgtaggcatggaaggtgacgccgggcaggccgtcgagcagcttgtggccgaccttgtcgatgatccagtggatcggcgtgtccgggcgcgcggcctgcagggtacgcaccaggggcaccacgtgggtgacatcgccaagtgcggacaggcgcaggaggcacaaggaggaggacgctgatgccatgtgttgttagactcaatgaaatggtcgcattcgacgccaatgaagcgctgacgccatgccgcgagggtcgcggcatcggggccattctgttcgaccgcgagcggctgcggcaagccgagatcggcctgttctcgccccagcactggggcagcagggcccggccggtgggcgagggcggccgcggcagcgcctggttcgtcgatgcgccgttcggtgccagcgtgctgcgccactatctgcgcggcggcatggcggcccgtatcagccatgaccagtacctctggcgcggctcggaccggacccgcagcttcgccgaattccgcctgatgcgcgccctgcgcgagaaaaagctgccggtgccacggccgatcgccgcgttctacatgcgcgagggcctgcgctaccgggcggcgatcctgatggagcggatcgagggcgtgcgctcgctggccgaccgcgcactggtggccggccggggggctccctgggaggagaccgggcgcctgattgcccgtttccatcgtgccggcctggaccatgccgatctcaacgcgcacaacatcctgttcgatggcagcggccatggctggctgatcgatttcgaccgcggcgtgatccgcatcccggcgaccgcctggcgcgagcgcaacctcaagcgcctgctgcgctcgctgatcaagctgcgcggcgagcgcagcgtggaagacgtgcagaaggactacgcgcggctgcgccgtgcctatgacatggcctggaaccggggcacctgatggactgggcgttgcgtttcctcggcgtcggcaatgcgtcggcggtcgagctggggtcgccgatgtcggtgatcgagcgcgatgggcgcccatggctgaccatcgattgtggtggcgaaggcctgaccgcgttcaaggcgcactacgggcagatgccgcaggcgctgttcgtcacccatgtgcacctggaccacgtggccggcttcgagcgcctgttcgtggataccttcttcaatgcgcaccggcgcggcaaggtgcgcctgtacgtgcccgccacggtggtgccgctgctgcacaagcgcatcggggattacccgaacgtgctggccgagggcggtgcgaacttctgggatgccttccagctgatcgtggtgggcgaggcgttctggcacgagggcgtgcgcctggaagtgtttccggtgcgccaccactggccggagacggcctatggcctgcgcctgcagggcgcgctgacctggagcggcgatacccggccgattccggagatgctggcacgctttgccagtgacaacgaactgatcgctcacgattgcggcctgcacggcaatccctcgcataccggcgtggacgatctggagcgtgagtacagcgccgaactgcaggcgcggatgatgctgtaccactacgccagcgcggccgatggtctggcgctggctgcgcgtgggcaccgcgtggcgcagccggggcagtgcgtgccgctggcgagcccgaccgccccgcacgtgctggtccaggacccgccgtgagcggtaccggccagcccgcagatgcggcgttggctgccgggctggaggcgctggagcgtgcactgcatgcgccgcaggtgcgtgccgaccgcgagcaactggccgcattgctggatgaggatttcagcgagatcggcagctccggccagtgctacgaccgtgcggccgcgctggtggagattccgctggagcgtgcccaggtgcagatcgaatcggagcagtacgccgtctggctgctgtcgcaggacctggcccaggtgcgctaccgcagccgccatcaccttgatgggccgctgcagcactgggtgctgcgcagttcgctgtggcgccggcacggggacagatggcgcatggtgttccaccagggcacgcccgaggcagggtagtgcggcgccatgccgggtcaagaatgcgaagccggagtcagatccctctgccatgcaaagggatctgagcccagtgcggaaaaggcggtggccccgccggctgacctcggcgcccgcgtcgatcgataccgttgctgccttccggccctggcggggttttcgacctagcgtcgcgaggggccgacggggccaccatagagacgttggccgcccggtgggcggccagttcacggatcaggggaaacagcgcgcggcgcgccggagaccacagccggactgcacatcgggctggccgatggcagacgcgcattctagcccaggcaggcccatcgacgccagcttcatgcactgaatcggctgtaacccgcttctggcggcagcggccggtacccacccccgttgctagaatgtcggccaggaggaacgacctcccccacatcgggaaccaatgaccaggacggcctggccctaccaagaggagggccgtcatggcctggatctatctgttgtttgccggcctgctggaaatcgtctgggccgtgtccatgaagcagtccgaaggcttcacccggctcacccccaccgtggtcaccatcatcggcatgatcgccagcttctggttgctggcggtggccatgcgcagcctgccgctgggaaccgcctatacgatctggaccggcatcggcgcggtcggggcgttcgtggttggcattgtgttcctgggcgagcaggtcagcccgatgcggatcggtgcggcggtgttgatcgtttccggcctggtgctgatgaaactctccagcagctgaatttatttactcatggcggggaatggattctccgccacatgcagcaatatgcattttcggcaaaaccattttgtccgcccctgttatttgacgcacgtcataaaaatagcgcgcgtgattcacatgccgctggcaccgtcggtcgcacagtgccgccattcgtcgggcgaaatcggggagttttcgccttgacggacgcgctggcgcacctgtccccgggtgcgatcgcgtgaagatgtgaagattttcaggagttaatgccttcaggccttgttcccgttcggggagccggggtgggtcgcattgtctccaaaaaacctgccagctgtgccatccggtcttttcatggagatttaccgatgaaccgcatttaccgtctggttttcaatcgtgcccttggggtaatgcaggttgcttcggaggtcgcccagaaccccggcggaagcgcggtcagcgcagggcgggtgccgcgattgcgggcgcaacagctggcggcggctttggccgccacactggccagcggatcggcattcgcagcgtgcaccggcaccacaaccgtaaactgcgacagcaccaccaacatcaacaactactccaacgcgaccaacggcctcacgctgaacatcgccgcgggtgcattgctgcgtacgccgccggtcgtaggtggcggcaacgcagcaacgctgaccggcgacaacgtgacggtcaacaacaatggcacgatcgatccgagctcgatcatcctcgcctcgcccggcctggtcatcggcaatggttctgccaacaacagcgcgatcgtcgtcaacaacaacgccagcggacagatcaagggtgtcgtcaacatcgcaacgctgctgggcttcggtggacaggcgctggtggcacagaatgtcaacggcaccaccaccatcaacaacgccggcctgatcagcacgtcgctgatcggtgcaggcagcgtttccgacgcgaccacggtggtgacttatggtggtgcagccgccaatgtggccaacacaggcaccatcgacggacgcgtcggcctgggtgcttctggcggtaacacgttcctcaatgcgggggcggtcagtggcagcgttcacctgggtgattcaaccggcggcaacaccttcaccgcagtgtcgggttccagcgttgtgagcggcggcggcagcgctcttgccggcgtgattaccggtgtcaccggggtaaaggttgcggctgcgggatcggtcgacgccggtaccggcagtggtgcggccaacaacacgctggtgttgcagaacgtcgtcagcggtccggggtccggcaccggcggagcggtgaccacgctgggctggaaccagtacctcaacttccagaagctcaccgttaacagcggcacctggaacctgcagggtgcgtgggcgggtgcaggtacgaccacgctcaatgatggcctggtcaatttcaacaatgccggttccttcggcacagggctgttcaccgccaacggcggtgccatcgcctctgccacggccggtctgaacctggccaacgctttcagccttggtggcaatctgtccctggcagggaccaatgcgttcagcctggggggcttgctgtccggtactggcgggctgacggtcaacaataccggcatcgttactctcggcggcgcaaacctgttctccggcggcgtcaacctcaatgccggcggcctggtgctgggcaatgccggtgcactgggcagcggcaacctgaccgtgggtggcagcgcttcactggatacgacggcgggcttcaccctgggcaacaatctggtgatcaatggcgggggctcgctgaacctgctgggcagcaatgcgttgtcattgaacggttcgatctccggtgccggcaacctgaccaagagcggcgccggcaccctcaccttgaacggcgccaatgcgctgaccggcagtttcaacctggccggaggcgcgttggcgctgggcgcgggcggcagcctgtcacccaccggcgcgatcacggtcggcgtcggtaccaccctggacctgtcggcggccgccaaccagaccatcggttcgctggcgggcctcggcggttcggtcaacctgggcagccacacgctcaccctcgcggggctgggcgataccagctacagcggtacgttcgccgcaggcacgggtggcctggtcaagctgggcaccggcgtgcagaccttgtcgggcgtgaacaacctcagcggcggcgtggcactcaacggcggcggcctgctgctgggcaatgctgctgcgctgggcagcggtgcgctcagtgtcggcggcaacgtgacgctcgatggaaccacgggggcgcttgcactggccaacgcggtcaacctcggttcgggtgccagcctcaatctgctcggcaaccaggcgttgacgttcaacggcgtgatcggtggcgccggtggcctggtcaagagcggtgcgtcgtcgctgacgctcaatggcgccaacaccttcggcggcggcgtggcgttcaatgccggcagcctggtgctgggcaacgctggagcactgggaaccggtgcgctgaatgttggtggcgtggtgtcgctcgacaccagcgcggcgcttgcggtcggcaatggcatcacgctgggcgcgggtggctcgctcaatgtgctgggctcgaacgcattgacgctgggcggcgccatcggtggcaccggcagcctggtcaagaacggtgcagccacgcttacgctgggtggcgcaaataccttcaccggcggcctggcgatcaatgccggcaaggttgcggtgggcagcggcggaagcctggccgccggcggtgcggtcagcctggccggcgttggcgcggacctggacatctcgctcggcggcaaccagaccatcggcgcgctgtccggtattgccggcagcacggtgacgctgggcagcagcacgctcaccttcggtgatgccaccaaccagacgttcgcgggcgtgatcggtggtaccggcggcctggtcaagcagggcacgggcatccagacgctgagcggcgccaacaccttcagtggcggcgtgaatctgacggcgggcggcctgctgctgggcgacagcagtgcgatcggcagcggggcgttgacggtcagcggcaacggttcgctggataccacggcagcgttgaacctgggcaatgcgatcaacctcggcgcggccctgaccctgccgggcagccagaacctggccctggccggcaacatcacgggcaccggcagcctggtcaagaacggcgcggcgacactgtccttgaacggtaccaacaccttcagtggtggactgaacgcaaacgctggcgccctgctgctgggcaacagcggcgcactcggcacggggacgctgggcatcggtggcaacgtctcgctcgacggcagtgcgccgctgaacctgggcaacaacgtggcactgggtgcaggcgccgcgttgtcgctgccgggttcgcagtcgatcacgctgggtggggtggtgtccggtgcgggcaggctggtgaagaacggtgccaccaccttgaccctcaatggcgccaacagcttcggtggcgggctgaccgtcaacggcggcggcctgctgctgggcaatgccggcgcgctgggcaccggtgcattgtcggtgggggccaataccacgctggacagttcggtggcgctggacctggccaacagcgtcaacctcggcgccggagcggtgctggatctgctgggcagccagaacgtgtcgctggggggcgtcatcagcggcaccggcgggctggtcaagaacggtgcggcgacactggcgttgaacggcgccaatacgttcagcgggggcgtcgggctcaacgcgggcgtactgcagcttggcaacgcacaggcgctgggtaccggccagctggacgtgggcggcaacgcttcgctggatgccactgcggcgctttcggtgggcaacaccctcggcctcgccgccggcgccaacctcaccgtgctgggcagcaatgacctgacgctgaccggtccggtgttcggcgccggcgggctgatcaaggatggcgcggcgcgcctcacgctgtctggcgccaacacgttcgggggtggcaccaccgtcaacgccggcacgctggcgctgggggccggtggcagccttgccgcggccggtgcggtggatcttgccggcgccggtgcgacgctggacatctccgcagccggtgccgcgcagaccattggcgcactcaacggcgtcgcaggcagccagctggcgctgggcgcgcagtcgctgacctttggcggcgccggcaacggcagctttgccggcgtgatcggtggcactggcggcctggtcaagacgggtaccggcgtgcagacgctgtccggtgccaacaccttcagtggcggtgttgcactcaacgcgggtggcctgatcctcggcaatgccagcgcgctcggcaccggtgcgctgggcatcggaggcaccaccacgctggacagcacggtggcgttgaacctggccaatgcagtgaacttcggtgcgggcacgcagctgacgctgggcggcagcaacgatgtcacgctcggtggcgtggtggccggcaatggcagcctggtcaagaacggtgcgggcctgctgaccctcaacaacaccaacaccttcgctggcggcctgaccctgaacggtggtggcctggtcgtcggtgcggatggtgcgcttggtaccggcgcgctggcggtgaataccagcaccacgctggatgcgggcgcggcagtgacgctcggcaatgcggtcacgctgggctcgggcgttgcactgacggtgccgggcagcaatgcgctgacgctgtcgggcgtggtcggcggcaatggcagcctgatcaagaacggcgctaccacgctgacgctgtccggtgccaacacctacaccggcggtaccaccatcaatgccggcacgctggcgctgggcacgggcggcagcctggccgcggcgggtgacgtcacgttgggcgcgggcgccggcttcgatatctccggtgccggcagcagccagaccatcggcgcactcaatggtctgggcggcagcacgctggcgctgggcggaaactcattgacgttcggtacggccggcaacgccgcgttcgacggcgtgatcagtggcggcggggggctgatcaaggtgggcgcgggcgtacagacgctgtccggtgccaacacctttggcggcggcgtgaccctcaatgcaggcgggctggtactcggcaatgacgcggcgctgggcaccggtgcattgacggtcggcggtgctgccacgctggataccaccggcctggcaacgctggccaacaacatcgcgctcaacgccgggctgaccgtgctcgggaccaacgcactgacgctcaacggcgtcctttccggtgccggcagcctgaccaagaacggcagcgcgacgctgaccttgaatggcatcaacagctataccggtggcaccaacatcaacgccggcacgctggcgctgggggccggtgccagcctggcggcgagcggtaccgtgaacctcgccacaggtgccacgctggatctgtctgccggcagcggcacgcaggtgttcggaaccctggtcggcaacggtacggtgaacctcggcgccaactcgatcgaagtcggcggcgccaccaatggcaccttcagtggctcgatcgcaggcacgggtggcctgaccaaggtcggtacgggcatcgagacgctgaccggtgccaacacctacaccggcggcaccttcatcactgccggtacgctggcgattggtccgggcggcagccttgcagccaccggcgcggtgacgctgagcgctgcaggcaccggcttcgatatctccaccgcaggggccaaccagaccatcggctcgttgaacggggtggcgggctcgacggtgagcctgggtgcacagacgctgacactcggtggtgtgggcaacagcctcttcgatggcgcgatttccggcaccggtggcctggtcaagaatggcgccggcgtcctcacactgggaggcgccaatctgttcagtggtggcgtcgcactcaacggtggtggcctggtggtcggcaacaacgctgcgctcggcagcggtgcgctggcagtgggcggcaacgcgacgctggatgcatcgacaggcgtcaacctggccaacaacatcgggctcgcagcgggcgcgaacctcgacctgcttggcagccaggcgctgacactgggcggtgtgatttccggtaccggcggcctggtcaaggacggtgcggccaccgtgaccctgagcggtgccaacacctacaccggtggtaccaccatcaacaacggcacgctggcgatcggcgcgggtggcagcctcgccgcgaccggcgcggtgaacctggccggtgccggcacgttcgacatttcggcgggcaaccaggccatcggctcgctggccggcgtcgccggcagcacggtggcgctgggtggcagcacgctgaccctgggcggcaccgtggacagcaccttcagcggtgcgatcagtggcaacggcggcctggtcaagaacggtgcaggcgtgcagacgctcaacggcggcagcaccttcagcggcggcgtaacgctcaacgccggcggcctggtggtcggcaacaatgctgcgctgggcaccggtgcggtgacggtcgcgggcgctgcgacgctcgattcgaacacagcggtcaccctcgccaacaacttcaccctcaacaacgcgttgaccgtcctcggcagcaacaacctcaccctcaacggcaacctgagcggcaccggcagcctgaccaaggagggagccgcaacgctgaccctgaacggcaccaacacctacaccggtggcaccaacatcaacgccggtacattggcactgggcgctggcgcgagcctgcacgccagtggcatcgtcaacctggcctcgggtgcgatcttcgatctgtcggcgggcagcggcacgcagcagttcggcacactggtcggcaacggtacggtgaacctgggggccaacacgctgacgatcggtgatgccagcaatggcacgttcagtggttcgttggccggctcgggtggcctgatcaaggaaggctcggggacccagacgctgaccggcaccaacaccttcaccgggggtaccaccatcaacgccggcacgctggcgatcggcgccggtggcagcctggcggcgaccggtgcggtgaacctggccaatgccggtaccaccttcgacatcagcgcgggtggtgcgcaggcgatcggttcgctggcaggcgtggcgggttcgaccgttgcgctgggcggcagcacgctgaccctcaatggcgtgggcaataccacgttcgccggcaccatcggaggggccggtggcctggtaaagaacggcgcaggcatccagggcttgactggcgtcaacgtcttcacgggcggcgtgaccctcaatgccggtggcctgctgctgggcaacgacggttcgctgggcaccggcgcgctgaccgtgggcggcaacgccagcctggacggcaccagcgcgctgaccctggccaacaccgtgcagctggccaatggcacgctgaccctggcgggcagcaacgcgctgaccttgaatggcccgatcagcggcgctggcggcctgctgaaagatggcgcggcaaccgtcaccctgggcggcgccagcacctacaccggtaccaccaccatcaacagcggcacgctggcggtggcggccggtggcagcctgtccggtgccagcacggtgaacctgtccggtgccggcacgttggacatcagtgccggtggcagccagagcatcggtggcctggccggcgtgaccggatccagcgtggtgctgggcggtgcgaccctgaccaccggcggcaacaacggcagcaccaccttcggcggtgtgctcagcggcactggtggcctggtgcagagcggcaccggcacgctgaccttgagcggcgacaacgtctataccggcggcaccaccatcaatggtggcagcacgctgcagatcggcaatggcggcagcaccggctcggtgctgggcgacatcaccaacaatggcagcctggtctacaacctgggcacgacggcaaccgtgggtgcggtggtcagtggcagcggcggcctgacccaggccggtagtggcacgctggtgctgaccggcaacaacacctacaccggcggtaccaccatcaatgccggcggcacgctgcaggtgggcaatggcggtgcgaccggcgcgatcgtcggtgacatcaccaacaacggtgcgctggtgtccaacgtggccggcaacaccttgctgggcggcaccatcagcggcaccggtggcctgacccaggccggtgccggtacgctgaccctgaccggcaacaacacctataccggcggtaccaccatcaatgccggtggcacgctgcaggtgggcaatggcggtgccaccggtgcgatcaccggcaatgtcgccaacaacggcagcctggtcttcgacgtcgcgggcaacaccaccgtcggcggcgcgatcagtggcagtggtggcctgacccaggccggcagcggggtgctgaccctggtcggcaacaacacctacagcggcggtaccaccatcaatgccggcggcacgctgcaggtgggcaatggcggtacaaccggcgccatcgccggcgacatcaccaacaatggtgcgttgatttccaacgtggccggcaacaccgcgctgggcggcaccatcagtggcagtggcggcctgacccaggccggcagcggtacgctgctgctgaccggcaccaacacctacaccggcggtaccaccatcaatgccggtggcacgctgcagctgggcaatggcggtgcgaccggttcgatcgtcggtgatgtcaccaacaatggcacgctgctgtccaacgtggccggcaacaccacgctgggcggcaccatcagcggcagtggcggcctgacccaggccggcagcggcacgctgaccctgaccggcaacaacacctataccggcccgaccaccatcaacgccggtggcacgctgcaggttggcaatggcggcgcgaccggtgcgatcggcggcagtgtcgtcaacaacggcagcctggtgttcaacgtgggtggcaacaccaccgtcggcggcgccatcagcggcagcggcggcctgacccaggccggcaccggcaccgtggtcctggccggcaacaacacctataccggcggcaccaccatcaacaccggcggcacgctgcaggtcggcaacggtggcgcgagcggtgcgatcaccggcaacgtcagcaacaacggcagcctggtgttcaacgtgggcggcaacaccaccgtcggcggcaccatcagcggcagcggcggcctgacccaggccggcaccggcaccgtgatcctgaccggcaacaacacctataccggtggcaccaccatcaacgccggtggcacggtgcaggtcggcaacggtggggccagcggcgcgatcaccggcaacatcaccaacaacggtggcctggtgatcaacaccggtggcaccaccacgctgggcggcagcatcagcggcggcggcagcatcgtgcaggccggccccggtggcctgaacctcggcggcaacagtggtggcttcaacggtaccggccaggtcaccggcggcggcctgaatgtcaccggcaccatcggcggccaatggaccatcggcagcggtaccacgctgtccggcaccggcaccattggtggcaccggcggtggcgtgacggtgtccagtggtggcgtgctgtcgccgggtaatggcccgggcaacggcagcggcacaggcaatggcaccggcacgatcaccgtgggtggcaacctgaccctgtcgccgggcagcacgctgggcatcgatctgggtgccagcggcagcgatacggtacaggtgggcggcagcgccaacgtgggtggcagcaccgtaaaggtgaacaccatctcgccgagcaccagctaccagcagggccagcagtacacggtgatcaacgcgggcggtggggtgagcgggcagttcgcctcggcgaactcgccgtcggccttcctgaccatcaccccggtctacaccgccaacaccgccaacctgcagatcgacgtggcgcagacggcggcgttcaccaccgtggccaacacgcgcaaccagtacaacaccgctgcggcgctggacagcctgccgcagagtggcgcggcgctgggcctgtacaacacggtgctgctgtatgacgccagcactgcgcgcagcgcattcgaccagctctccggcgaagtgcacgcggccagccgcgcggtgctgctgtacgacaactatctggaagagggcatccgccaacgcctgggcagtgagctgccgaccgtgcgtggtgagcgtgcctcggcctggctggctggtagcggcaaggtgttcaagcaggatggcgatggcaatggcgatgagatccgttccaaccgcaatgcggtgatggcgggtgtggactggcagctgggtgaacacgtggtgctgggtgcggcggccggcaacgaacggctggatacgcgcctgtacgatcgcagttcgcgcgcccgcctgcgcggcaacacgttcggcctgtatgcacagggacagtggaacaacggctttgcggtcggtggcagcgtgtcgcgcggtgactaccgcacgcgcaccacgcgtgaagtgcctctgctgggccagaccctgtacagccgccaggattcggacgtgaccatcgcccaggtcgaaggcagctggacctggacccatggcaggacccaactgcagccgtacgtgcagttcacccggcactgggtcgacagtgatcgtgcgctggagcagggtggcagtgccgcactggtgctggaaggcggcaaggacacgctcaacgtcagcacggtgggcgtgcggggccgctgggacgtgggtagcggcgcgcgcttcccggcgcagctgaccgtcggcctgggctggcagcatgcatcgggtgacaccgatgtggccagccgcaaccgcttcgcggtcggtggcgatgccttcgatgtctacagcgcggtgatggcacgcaatgcgctggtcagccagctcggcgtggcggtcggcctgggtcgcaacagccagctgtcgatgttcgtgcagggccagcacggtgatggccgccgcgatgtcggcgggcagatcaacctgcgggtaggcttctaaggggggcgggccagcggtagatccacgcgctgcgtggatctaccggcgcggagggagtgagacctcccgcgccacggtgtcggcactgcaaccacctcgctcagttcgccgcatcctgcgtgcgtcgacgcaatccggcgggcgggtcgaacaggctcgacggcacctcatcgaaagtgacctcggtaacccgcaggccgcgttcggtacgctggttgccggtgcgtccgcggtaacccagcagcaggcccgtgcgggtatcgatccacaacgtgccggaggtggtgccatcagggccatgcgcattgtcatagcgccagccagcagcgaggcgccccaggatgaactcgccgggtgcgggagagcagcgccctccgatcgtgtggcatggggcggcaggatcgtaccagtagggaccactggcgtcggcgaccggcagcgtgtagttgccgcgctcgctcaccagccatgcccggccgcgctggccctgggtggtcagccatgcatcgggcgcattgtcgccgcggaaatcaatacggatggcaggcccgcgcaaacggatctcgacctcgacctcaccaccaggcgagcttggaccgagtgggcccaggccataggcgcgtgccagcaatcgcgcctgtggaggttcgttgtcagcagcgtccgtggattgcgcggcggcggcccaggttgctgccatcaacaggctggccagcagcacctgcatgtcagcgcgccaggttgttgctgtcatgcacggggctctgcatgcggacgatcgcgtaggactcgatcggcatgcggcgatggccggtgatcgggtcctcgatcagcatcgaggccgggcggaagctgtcgccttcgctgaccaggtctgaaagaccggcaatcacccggtcggcaaagggaacgatcaggggcatcggataggtgaccttgatcttgaggatgttggcgtcctgcacgctgacgcggctgctgccgacacgtgcatcgcggaaggcaagattgtcgttcggcagcgcatagcgcccatcgaactggcgctcgcggaactcgttgtacgccgcgcggctgggtgaaatgacctcgatcttcggtgacagcaacgggttcttccacagcagggcgaccttggcgcgggcggcgacggcaccggcggcatccggcgaggtcgcgtacaggggagccatcgccatttccagtgcgctgcgcatctcggaatgattgacgccactgactgcgccggcacgcgcggcctgcagcgtggcgaaatccagcagcgacttggcgcgatagatcaggacgaactggaagatgaccaggatgaggaagacgaaggccggaaccacgatgcagaattcaatcagcgattggccccgctgctggcggatggatgtgcggatgtgcttcattgcaacgccctcgtggatggcggtgccgcaggcggagaagggcaccattggaacgtctcgcccagcaccggagcaatatgcctgaggctgtccaccggcatttccagcgtcgagtaggcgccgcggcaccaggcgccgcgccatgggcgcacggcctcgcgccagccaacggcgcgctgatcgcggtccaggaacaacaggtcgagtggataccccatggccagggtgtgcacgctcgagcagggggttatcagcaggccttgcccaggctggagtggcgcgcgcaacagcaggccgcgcagccgctggtgccagcgatcggcatgccagacgcagctgagcaactgctggtggttgcggatcagggccccggttctcatgtgcggggactcacaggatgccctgctgcttcatctgcaggaagatgaagtaggccaggacgacgaagatcagcgggaagaagaacagcaccagcggcagcatcatcttcaccggcgcttccagggccagcttctcggcgcgaaggaagcgctcttcgcggcgctgcatggcctgcgagcgcagtgtgtcactcaggctggcacccacccggtccgcctggatcaaagcgctggtgaagctggtcacctgggaaatgtcggcgcgatcggacatgcgccgcagcgcttcggcacgcggaaggccggcgcgcagatcacgcaacatgcgcgagaactcctgtgacagcggaccgggtggccccttgtcgacggactgttcgatcgcaccggtgatgttcaggcccgcttcgacggccatggtgatgaagtcgaggaagataggcaggtcgcggatcacatgcttggagcgcgctttccgccgttcgcccagccacagcgtgggatacatccacccgaagggtgcgccgaatgccagggccatcagcacggagccgactccgaaccggcccagcaggatgatggtgagcaacaggaaggtactggccacggcggcggagacgatccgtgcgccatacagttcttccggtgacagcacgaagtcctggccggccgactgcaggctgcgatgcgcgcgctccagctgtgccgaggacaggcgcggcccggccaggcgcgtagcgaccgtaatcagcggccacaggatgcgcagcagcagcggcagcggatcctggtagttgcgctggtccacctcgaccgactgcaccagtccgcgcagcgcgaatgcaagcagcccaacagcggcagcggcaagcagtgcgaccaggatgagcagggcgttcatatatcgatcgtcatgatcttgcggcacatgcggtagccgaggtattccagtaccccgatcagggccatgacgcaccagccgatgaaggtgtggaacatggggttcatcgtttctggatagaacagcacgaggaagccgacaaggccggctggcagcatcgccatgacgatgccctgcaggcgcccctgcgcggtaagtgccttgaccttgccttccatgatgagcttgcgccgcagcgtttcggcgagcgtggagaggctctcggcgagattgccaccaacctcgcgcgaaatgctgacggcggccacgaacagcttcacgtcggcaatgggcacgcgggcggcgaagttgtccagcgcctcctccgtgcgcacgcccatgtgctgctcgcgcagtaccagtgccagctcctgggccagtggaggcaggccgtcatgggccagtgcttccagcgcaggattgaagccgacgccggccttgaggctgccggccagcatcagcagcccgtcgggcaactgctgctggatctggtcgaggcggcgctgcttcagccaaaggtagatcttgcgtggcgctatggccagcaggatcagggccaggatcggcagcagcaggttgccgccggtgacgatccacagcagcacgggaatcgccagcagcatcaggacattggtcctgaacagcacgcgcgggtcgacgaacaggaacatgtcggccagattgacccgcgcctggtccatgaagttggcgcggtagcggtccatgaagccggagctggcacgcgccagcaacagcaccgagcccgtcacgcaggcaaaacacagcagggcgatcagcaggatgtcactcattccgccgtcccccggtacggaaaatgtccaggtcaacggcgacgccgcgctcggcaagctcttcatagaactccggcactgcaccggtcgcgacgaactcgcccaccaccttgccatcgcgtccggcagtggagcgtgccttgaacaggaacacatcctgcagctggatggttccgctttccatgcccgtcaactcagtgatgtggctgaccttgcgcgaaccgcaggggaagcgcttctggtgcacgatcaggtccactgccgacgagatctgttcgcgcaccaccgtcatcggcagctccatgccggacatcatgaccatcacttccaggcgcgacagcgcctcgcgcggattgttggcatgggcggtggtcagcgatccttcgtggccggtgttcatggcctgcagcatgtccagtgcttcgccgccgcggcactcgccgaccacgatgcggtccgggcgcatgcgcagcgcgttgcgtaccaggtcgcggatggaaatgtggcccttgccttccatgttgggaggacgcgcttccagggcaaccaggttgggctggacgagcttcagttcggccgcgtcctcgatggtgacgatgcgatcggtatcgggaatgaagttggaaaggatgttgagcagggtggtcttgccggagccggtgccgccggtgacgacgatgttgcgccgttcgcgcaccgcaacgatcaggaattccagcatcggctggctgagcgaaccgaaggtgagcaggtcctttccttccagcttgcgcttggcgaactttcggatgctgatgctcgggccgcgcagcgccaccggcggaatgatggcgttgacgcgggagccatccttcagtcgcgcgtcgaccatcggcgagctttcgtcgatgcggcgaccgaggggcgtcacgatgcgctcgatggctgacagcaccgcgcggtcactggtgaagacaatgggggaccgttcgatccggcccgcacgttcaatgaagatctggtcgtgcgcgttgaccatgatttccgtcaccgtcgcatcgtcgatcaggtcttccagcgggccgaggccgatggcctcatcgagcacctccttggccagcctgcgtgggttgatcgtcttgggcagctcggagaactcccgttgcatcacctcatcgatcagcttgatcgtggcgttgcgcagcgactcatcgtccatgctgcgcacgtcaagccggcgcaggtccatctgcttgaccagcgaggcatgcagctttgcacgatagaccgccatgtccggcggcagctgctccggccgcgccagctggcgttcgctggatggctgcgccggtgcgggggccggtgcgggcgtggcgtccaccggtacatcgttggccgcgcccgcattgaaacttccagcatcggcggtgggttcggccggcgggtcgtcgtccaccacctgcagcaggtagtcgccgatctgcacgcggtcacggctggtgagcgggccacggctgcctttgacctgttcgccattcaccagtaccggcgagcggcctcccaggctctcgatgaagatgccctggtcctcgcgcttcagcgccgcatggcgttgggcgatgctccagccctgcagcaccaccaggttgccgtcgccacggccgatcccgcattcacggtgcaggcagcggacacgtcgctggtcgcggttgggtgtgtcgatgaggatgttgaacatgcgacggctccggtcactgcacgaaatctttgttccggcgcggcatggcctgctggccgcgctcctggatctgtcgcgcacgctccaggccatcgaggttttcctgcgagcccggcgtcaccacgcgcggagtaacgaacatcaccagctcggtacggttgccacggaagccatcggagcggaacagctttccgaggatcgggatatcgcccagcagcggcaggcgcttggcatcctgctgcgcgctggagtcgatcagcccggagatgacgatggtttcccctgcgtggacattgatttccgactcggtgcggcgggtggtgaagcccggaacgccctgcacggtcaccgtcggatcgacacggctgacctcagccaggatgcgggtggagatgtcctggttgaagttgaccaggggctcgatgtcgagcttgatgccgtattccttgtagtcgacggtgacctggccgaaaccctgcggaaccgggatcggcacttcgccgccggccaggaacttggcctgcccgccgctgcgggcgctgagttggggcgaggccagcaggaacgccttgcccttgttcatcatcaggttgatcgccgagccgatctgcgtggcgatgccaaagaaggcctgggttccctgcagcttgttcggcagcagcacgccgttggccgggctctgctcggggttgatgcggtagtagttgttgttggtgaaatccttgacgatgcccgccaccgggccacggatgacgttgtcccactggatgccgagttcttccagcgcattggtgtcgaattccatgatcttcacgtccatctgcaccatcgggcgcatgcccaccgggtcggcagtagtgaaattcaacaccgtcgggtagatcttctggatcgcatcaatgcggctgccgatgcccgggttgatgtcctggccggtaatgaccacacggtcggcgaccgcatgcacattgatcttttccacgtcggccagcagggtacggatggtctcggccaggctgacggcatcgttctcggagatgtccacctgcacctgcagctgcttgccgttctgcagccacaggtgaaccgtggtggagccgggcttcatgcccatcatgatcaggtcgcgcgggccgacgttggtgacctcgagcatctcgccactaccgacggccacgcgcttgagcccgctgggcagcgtgtagacggcggcctggccggcatagatccgggcgcgggtgggcagtggcaccgcgggcatggccgacgcgctggtgcgataggcgggatcgggaaccggcgccgggaaggcgctctgcccaccgggtaccggtgcatggttggtgttgggctgcggttgcgcctggacagcagggcgcggtgcggccatgaccggtaccggggtcagctgggtgccggtggtctgtgccacggccagcagtggcgaggtgacaacagcgatggccgcagtggcggcgatgaggctgcggattccattattgctgcgcattcgtcgaccctttgcccccaatgatgaattgcacgccagcacgaccctgcgtgccgttgccgagcagttccctctgcgtcatgccactgaggccgaacgcaccacgatcctccacctggcgaagcatcacccgcatcgaaccggccttggcggcgaccgtgagtcgctgcgcctgtgccggtgtcagttccagagtgatgttcgaatagccctgctggtcttccgaggccggcgtttcgccgacgcggttgccggttgccagcacgttgatgtcctcaagcagcggcagcacccgggcaccggtctgttcctgctcgacggtgagcaggatgtcgacgtgatccccgggagcaatcatgccggagatcgagttcgtctcgtccacctggagggtgtagcccacgttgcccttggcgatcacgcgcgagaactggtcgtacagcggtaccagtgcactggcacccagcggtgcaccttcgcggatcggcgcgcgcagcatgcggccgctgtactcggacacattgtccggcgtgatcgcatcggcaggcggcaggtcggcggggacttcgcgcactgcaaggtcggcaacggtgacaatgctgcccggctccatgtcggtcttgggcacggctaccggcaccatttccaccggcggagcggcacgctcgttcaccgccttctgcacgtagcgcacggcgaccagggccgcgaacaggccgagcgcgagggcgatgatgatgaagacgacgttgcggttggctttcagcgggagcgccttcatacgactcccatcgacagcatgtaggtgaacccctggtacgccttgcgcagtgaatcgatcagctcgagcacgatgttcggctcggcgaccaggaccaggacaccgacggaagcgaccacggcgtactcgatcagtgcggccccgcgctggcggcgtagggacgggggaatgcgttttctcatggcggtggtctcagtgctgcgactggttgacgacaatcgaggttccctgctcgtgccggttgaaggtcatggtcatttcctggctgcccttgctgtagcggacaacgcactgcagcgcgatcatcgaacaccccgcagggccggaacttcggctccagccgtccgcagggaggcggctggcatagaaggcatcggtctggaacggagacagcgtgctttccatggacaggctgcgcccgggcgtgtccaggtaggtgatgtcgttgatcacctgcgtcccggacggtttcgggaaatcggcgccggccgcggcatcgggcttgcgcttgagcaggcgtgtaatgccgatctgtgactggctgccactgcccttggccgatacctcgatggtcacgtagtactcgccgtgtgcgtggccgatcacggtcttgccgccgacctcgttgatcacggtctgcccgggccattcgcggttgtagtagctgacgatggacgacaccggcaatgcggacgtgaagcgcgagatgcgcatgggcaggccgttgtagagcatgtccttggccacccactcgctctgcgcgccctcgggctcgggaatgtccggccaggacgcggccagcgcaggccaggcgaacagcagcgcggccagtgccgccagcaggtcaacgcgacggcgcataggcaggcaacttgtcgacaggcaccacgtcgggcgcgatgtaaccgggatcaagcctgctcagcgtcccgatcatcgggatgccggagaggccgtcaaacgccttggcgatgcccgccatgtgctgggatggcaccagtggcttgacctgcgcgatcaccgagcgtgacgagttgaccttgagcccggaaccggctgcattccaggggtcggccagcaccacatgggtggcctgcagcttcaggcccagcgaatcgaagggttccagataggcggcagcactgccgttggcacttttcagatcctgcacatccaaccgcagctgggcctgggtcaggccgttgcggttgggcgggaacgaaccgaacatcgaggtcacgtcgccgatcttcttcatcatgccgcctgccgacgtgctggtgtaggagaccagggcgaggtcaccgcgccgcaccagcggctggttggagaaggtattcatcaggacgtcgccgacggcggcatcgcgtgcgccggtctgcgcctggctgacgatgggatcgttggcacgcccgaaatagcggtcgacggcaagatcgcgctggcggccgctggccggcagcttgtagtccggcgatacggtggcttcccaggcgatcgcgcgcgcggcctgctgggtggcctggcgggcgtggatgtacttggccaggatcgggatcagcaggaagatcggcaccagcacggcgcagagcacggcgacttcggtgagactctggccgcgctggcgacgcgcgccgcggaatgggcgttccctgtccatggctacctcagcaggtcatcgttgggaggacggttcgcgcggtacctcgaggtcgccgcgttcaaagggttggcccaccgtcatgcgctgcgtggtcaggcgggtgccattgccgtcgaggggttcctgctccaggacaatggcgtagcggctcggccggtagtcgttcagtgcaccgggggtgaagccccagctggcaccagccgaccacacgcactggctgaaccgtccgttctcgtccttccacacgttgcacggctggccagcgaccctgcggttgcccgcgcgctggaagcccggcgaggcgctgccttcgtcggcttcggcggcaaagcgggtgagcccgtcgctgtcggcgggggactggctacgctctcccgttgccagatcgacctgctccacgccggaggcgctctgggtctcctgcaggccggtggcctccagccggaactggcagctggtcgcagggccatcgttgagcaggcgccattcgcgggtacggaacacttcctctttgctggaaagccaggcttcgtaacgaacggttcccaggcgggcgacatcggcgtcatccagtgcgcgggtcggcaatcctgccgcctggcagtcgctcagtgcctgctggtagctggtgcgcgccgcgttgcgtccatccaccagggtttcggcaatctggtcaagatggatgcccggcatgttcctggcagcggcgggctcgccgttgtccgccgcgctgccacagccgctgatcagcagtgtggcgatcgacaggtgcaggcgattgaaaacagcaaacgtcatggcatcaaggctccggctgccgccagggcagccttggtggtggcatcggtcttgaccagtcgtgcctgccagtaagggctgaacaggtttccggtttcacgcttgcggtcatcgcggctgaacatgcgcagctgcaccgggcggtcgaagaacacctgcgcggaggaaagtgcggcgatcttgttgttggccatcctgtccggcagttccatctgcgagccggccggggcgccgatgccggcgccggacgtggtgcgcgcgctggtgccggcggtctcggcatagatggtgaagaccgggccgaccttgtcgcggtcacgatcattctcggcgtagggctgcagtgcctgcccggccttgacgtcgtgatagtcgcgcaggccgttgtagccggtgaagaaggccttgcgatgctggccattggcgaagcgcacgttggcatcctggctgcggtcgacaatccacgccgcgccacgattgcggcgcaccgcttcgccatacgggcggtagcggcggcggtcccagtccgagtaccagccgttgccgttgccgaagccgttgaggaagcgctggttgcgatagctttccacggcctgcgcaccgccccagccgactggaatatcgatatcggaaagcggccatggcagcggaagctcgacggccatggtgtccagcgctgcccatcggttgtagtcgaccatgtcggtgccgccggactgcaccaggaagccgaggaaatcatcgctgcggctcttgctgaagccatcacgcgactgcatcaccacattgcggaagcggtcggcgccctggcgctgcgtggccgagccaccgttggcggtacggggaatgctgtagcgctgcagcagccggttctcggccgtggccagttgcgtgccgagcaccgcggttccgatggtgcccagctgtgcctgcggtgagttccgctgcagcacatccttggcgatggtgtagctgtccagccgcgatacgccctcgatgacgagctgcaccgaggcggcgaacatcatgttgagcttgtcgatggcgatgatggccgcctgcgcgacaggctggaacgcctggcgggtgaccttgagaatgcgttcggcgaccttgaaggcggttgccaatgccttgaacaccacgccgatgtagggaatggcggagagcacatccagcgtggtgcggatgacgatggaggtggtgtgcatctggttcagccacgaatagaggctgatcgtctgtgccacggccacttcgttggcaacgcgggcacggttcatgtaggccgcgtagttcagtgcgcgtgcctgctggatcgcaacgctgtaggcggcggcgtcagccgcattgaccagctccaccttcttgttcaccacctgccctgtgttgaacagcaggacaatcccgatgcatagaaccagaatgagtgccagcccgagaaccattgcttggccggcgaccgttcggtggctggaaacgccccgggccgcacggcttcgtgccaaagccaatgcgctgcgcataacgaattcctgggccggaggccatggctgcccgtcgcgcgccgcgtgcggtgcgcgcagggagattatgctgggagggccctggcggcttcatgccgccagggctggggtattacttgttcttgtacgcgtccatgcccttggttttgtcagcttcctgctgggcgctgttggcctggttcttggcgcggttgatcgactgcgtcgcgctctggccggaaagttctttcgacatgcctgccacctggctgcgaaccgtgcctccgaagaaggtgacggctccgatcgcggcgatggcgatcagcgcggtgatgatgatgtactcggtcatgccctgaccggcctgcttacgggaaaaacggatgtgacgacggctgcgttccatgtatttcctccttgatggcaggaatcctcccgggtgtgcgggatattcggcgtgtccgctgggggatcctgattaatggcagggcgaggtaaagacaggaagctcacaccctggttcgtcgaaaatttgtcgcttgttcgagaacggggccaagcctatcgacagaaaattgacgatacaagtcaggtttttccgatatgcaatgaaatatctgaaaatgtgatgcacattgcagattaacaattgtctgcacataatcacgtcaaatttgagctagatgcaccgcttttcgttaaggaaattaacacttaactgacatatttgtgtcacgcaggcggcttgtggtgccggaatattggcgcgctacagagggcgcgtgcacggcctgcttcttgttcgaacggcatgagagatccgcgtgtttttatctcgttgcatccgcggcaaaacaaatgaccgtgcggcgcggaaaagaaaaaagcacatgcagggcatgtgctttttccggagtgcttcaacgcagtaacgtcgtggtgatatcagcgcttgaccagttccacgcgacgattggcgcgacgcccttcttcggttgcgttgtcggcgaccggctggctctgcccatagcctttcgcgctcaggcgttcggctgcgattccaccgccgacaagacgcgtgcgcaccgactccgcacgcgcctgcgagagcgtctggttgtgcgattggctgccgctgttgtcggtgtgtccttcaacggaaaggcgaagctgtgggtcggccttcaacagctgggtgacctgtgcgatctgcggttccgaatcgggcaggatctcggcggcgtcggttgcgaagttcacctggatggataccttgccactgctgtccagtgcctgtttcagcgtgtccgcttcaatgaccttggccgtgatctgcaccggttttgtctctgcgacgagcaggccgccggagtttccacccgagcccaggtgaatccagatatcgcgatcttcgcgatggatgacataggtttctgcgggttcgttgtagatgtcgccgatgccgccgacataggtggtcgccgccttgctgttgccgatgtcacgcgatgcatcggccggtatggtgccggagaaaatgcgcttgccccccagggcctcgaccaggctttgtacattgcggctgagctccagctgcgaataagggtgatcgctgctgctctgcaggaccgaagaatgaaccttgccttcaatccattccacgcgatcgccggtccagaacggtacgcgatcgaattcgctgtctacgacgtcctggctggtgtagccctgcggcagtccgagataggggaagctgccgatcgttgcctgcgatacgggcagctcggcaacattgaacgctgcggccttctggcttccatccgtggccgcagccgcctgcggtgatggttcggctgcggtgctggaaggtgcggccgaggaagcgccaccctctgcaggcgcttcgccagcgcgcttgcaggcacccagtgccagtaccaggctggcggccaacaggctcgcgcgcactgcggacatcgtcgatccgtgcttctgcgtcatgaacgcacctgcttcatcagttcgttgcagacttcgctggtgggcttgtactggcccttcttccaggcatcggtgatcttcttctgtgtctgcgcttcggccgtgtcataggcctggtcgaagcctgcttcggcgccgaacacggtttttgcctgtgccttgtggcttgcgcgcagcttggcggcctgttccggggttgcgccgcacgccagggcattgcctgcatgcgtgcctcccagtgcgccgaactgcgccgcaccgccgccctgtgcgactgcggtgccgctgccgatcagcaaggcggaggtgatcactagcttcgtcatgaaataccgcatgttgatgttcctcatccggcccgatagcgggcatcaatcccctgtggcccgagcatagcaacaggcagtgagtgccagcgtgtcgttgcatcgccacggcacggccagtggtcagggcgtggacaggaagcgcggggtgccacgacgtggggcagatcctgtcgttggacggccatcgaacgtggaagcgggacagccgaccaggcatccccgcacggcggaaacccattgatggatctggagcaacaagcccctctgttgaggggctgccccgacaggggcggggagaggccggcaaggggaggggcccgaacgttgcgcagcaacgtttggggcgaagcgcgcgcagcgcacttcgcatcccccgccagtggcttctgcgaggtacagccgaccaggcatccccgcacggcggaaacccattgatggatctggagcaacaagcccctctgttgaggggctgccccgacaggggcggggagaggccggcaaggggaggggcccgaacgttgcgcagcaacgtttggggcgaagctcgcgcagcgcacttcgcatctcccgccagtggcttctgcgaggtacagccgaccaagcatccccgcacggcggaaacccattgatggatctggagcaacaagcccctctgttgaggggctgccccgacaggggcggggagaggccggcaaggggaggggcccgaacgttgcgcagcaacgtttggggcgaagcgcgcgcagcgcacttcgcatcccccgccagtggcttctgcgaggtacagccgatcaggcatccccgcacgacggaaacccattgatggatctggagcaacaagcccctctgttgaggggctgccccgacaggggcggggagaggccggcaaggggaggggcccgaacgttgcgcagcaacgtttggggcgaagcgcgcgcagcgcacttcgcatcccccgccagtggcttctgcgaggtacagccgaccaggcatccccgcacggcggaaacccattgatggatctggagcaacaagcccctctgttgaggggctgccccgacaggggcggggagaggccggcaaggggaggggcccgaacgttgcgcagcaacgtttggggcgaagcgcgcgcagcgcacttcgcatcccccgccagataactgaaaagggctgccttcgggcagcctttttcagttatctggcggagagagggggattgtcgggtgcatccatgcacccgatcccggtgcgcgctgcgccccgggacccgccttcggcggtccggttctgctcctgcagaaccgtcgaaccccggcagggcttctctcgcccgatgctctccgccagccaaataaaaaagccgcccagagggcggcttcttcatttgtctggcggagagagggggattcgaacccccgaagcgcggtttagacgcttacacactttccaggcgtgctccttcaaccactcggacacctctccggatccctgccatcggcaaacgcctcagcaggggcgcagattctagcgggcggcgcggtcggacacaagcaccccgatcgacggcgtatccatggccatgggtggcgagggggctggacaggcatggcacaatggaacatccgatggaaaacggtggcctgatgtcctatctcgtccttgcccgcaagtggcgtccgaagcgtttcgccgagctggtgggccaggaacacgtggtccgtgcgctcagcaacgcgctggacagcggccgggtccaccacgcgttcctgttcaccggcacccgcggcgtgggcaagaccaccatcgcgcgcatcttcgccaagtcgctgaactgcgagcagggtaccagcgccgacccgtgcggccagtgcgcggcctgcctggacatcgacgccggccgctacatcgacctgctggaaatcgacgccgcgtccaacaccggtgtggatgacgtgcgcgaggtgatcgagaacgcgcagtacatgccctcgcgcggcaagtacaaggtctacctgatcgacgaagtgcacatgctgtccaaggcggcgttcaacgcgctgctgaagacgctggaagaaccgccggagcacgtgaagttcctgctggccaccaccgatccgcagaagctgccggtcaccgtgctcagccgctgcctgcagttcaacctcaagcgcctggatgaagaccagatccagggccagatgacccgcatcctggcggcggaagcgatcgaggccgatggaagcgccatcgtgcagctggccaaggccgctgacggcagtctgcgcgatggcctgtcactgctggaccaggcgatcgcctatgccggcggcgcgctgcgtgaggacgtggtgcgcaccatgctgggtaccgtggaccgcacccaggtggcggcgatgctcgatgcgctggccgacggcgatggcccgcgcctgctgcaggtggtagccgcgctggcagagttctcgccggactggagtggtgtgctggaagcgctggccgaagggctgcaccgcatccaggtgcagcagctggtgccgggcgctgccgcggcggaaggcctggatgtcgccgcattcgccgagcgcctgcgcccggaagtggtgcagctctggtaccagatggccttgaatggccgccgcgacctgccgctggcacccagcccgcgcgcgggctttgaaatggccgtgctgcgcatgctggcgttccgtccggccgcagcggtaccgccggtgccgaaggccgtcgacggtgcgttgggcggcacgccgggtggcaacgctgccggtggtggcgccggtaccggtagccgcgatgcgacgccggccgctgctgccgcttcgggcagcccggcggtagcggcgcaggcagccgcgccggtgcaggccgcgccgcgcgaacctgaacccgagcccgaaccggccccgcaaccggaaccagacccgacgccggagcccgagccggttccggtggaagagcccgtgtcgccgccgccggtgaaggctgagccacaggcgccggcgcctgccgtcactgcagaggcaggcgacgacctgccgccgtgggccactgacgaagccgaggcgcgtgacgaggcattggcggccgagatgtccggcccggacgccgccatggctgcgccctggcacgaaccgccggctcccgtcgcggctcccagcgagcctgcgccgcccgagcgcccgttccgcgccgaaggcattgccattgcgccggccgaacatgccaagccggccccggcgcatgccgccgcgccgcaggaaggtgtcagcgagctggccacggccgaagactggctggacctggtcgccaacagcggcctgagcggcccctcgcggcagctggctgccaacgccgccttcatcagctgccagtacgggaccttgaaactgggcctttcgcccggatttgaatacctgcgctcggagcgcgcgctggctgccctgggcgagatgctgcagaaggccctcggccaggcgccgaagatcgtggtcgagaccgtggaaaccgaacacgttccggccgagaccctgcatcagcgggccgaccgccagcgtggcgagcggcagcaggtggcagaggccgttttcatggacgacccggaagtgcaggtgctgatccagcagcacggtgcccgggttgtttccgattccatccgttcttttgacgagtaagacaccatgcgcggaaacatcgcccaactgatgcagcaggcccagaagatgcaggaaaacctgcagaaggcccaggaagaaatcgccaagatcgaagtgaccggcagtgccggcggcggcatggtcagcgtgaccctgaccggtgccaaggaatgccgcaaggtgcgcatcgacccgtcgctgaccagcgacccggagatgctggaagacctgatcgccgccgccttcaacgacgcttcgaacaagatcgacgccgagtcgaagtcgaagatgggttcggccaccgccggcatgcagctgccgccgggcatgaagctgccgttctgattgccagcgtggcacccgtgcaagcgggtgccacagaatctgtagctgtcgagcctgctcgacgccatgaaagcatgccgccgtgtccgcacccctgcttgaacaattgatcgacgcactgcgggtgctgcctggcgtgggccagaagaccgcacagcgcatggcctaccacctgctcgagcgcgagcgcgaaggtggccagcgactggccgaagccctggcgctggcggtggagcgcatcggccactgcgcgcagtgccgcgacttcagcgaaaccgagctgtgcccgacctgtgccaacagcagccgcgagcgcagccagctgtgcgtggtcgaatcgccggccgaccgcctggccatcgaaaacgccaccggcttccgcggtgtctacttcgtgctgcagggccggctgtcgccgctcgatggcatcggcccgcgcgagctgggcctggagcagctggagcagcgtctggccgacggtgaggtgcaggagctgatcatcgccaccagtgccaccgtcgaaggcgaagccaccgcgcactacctggcgcagctggcgcgcgcgcgcaaggtgcagcccagccggctggcacagggcctgccgctcggtggcgagcttgaatacgttgaccgcggcacgctgtcgcacgcgttcggaacgcgcagcgaattccgcgattgagcgccacccgggcatcgcccggcgcggccggcctacaatgcggaagacatcccgccgaggccgaccatgagcaacgaaaccctcttcagcaagatcatccgtcgcgagatcccggccaccatcgtctacgaggacgacgaggtgctgggcttcaaggacatcgcaccgcaggcgccggtgcacgtactgttcattccgaagaacgagatcatcccgaccctggacgacctgcagccgtcgcaggcgcacctgatcgggaagcttgccctggctgccgccgaatatgcgcgccgcgaagggttcgcgcaggacggctaccgcatcgtgatgaactgccgcgaggatgccgggcagaccgtgttccacatccacatgcacctgctggccggtgcgccgctggggcatttcggtacgccggggcgctgagcgcccggcatccaccattgcccgcagtggatccatgcgatgcgtggatgaaaaaaggccgcccgaaggcggcctttttcgatcacgcatggccggtggcgatcaccaccagccccaacggccgtaaccaccccagtacgggccatacgggcccgggccccacgggccataggggtagggcaccacatcgacctggcgctgttccggccacaggtagatcacatcggccgacagcttcggcaggcgatagtcgtactccccgatgcgggtgttctggtagccgtcgatcttgccgatgaaggtcacgtcgcggccggcttcaaacacggccgggtcgtagaagccggcgcggcaggcaatgaagcggccgtcgctggcgtcggacgaggtggtgttcgggcggccactggcgttgagggggcgcgagatcatctggaagcaggtctcgccctggccgggcttggtctcgatgatgcgaccaccccatcggaccggcgtgccgacctgctgggtggcgaccgagtcgcgcggggagaccaggctgaactgtccctgcagcggcttgggggccgtggcgcaggccgacagggccagcgtggccacagcggtgaggaggaacttggtgttcatggggaggctccggaagtcgggcgatgcctgcgcaggtcccgcaataatgaagcgaggtcggtgcaagttccagcgtaacgcgcgtcggcgaaacgccggctgagtgccagcagggcggggtcggggcgcacggcgtgtacccgtcgtgaccagtcgcatgccgtctcgtggggtacgcgggccaggccaaggcgtgcatagcgccgccccagccggtgccaggcgcgcagcagcgggtcgcgctcgcgctcgccgcgggccagcagccaggccatccatgccaatgccagcagtgcggcgaccacgaagccggccaccagctgcgccggcccgagatcatccagcccgaacggcctgagcagctgctgctgacggcgtgcgtcgaaggaaagcaccaggtcgttccagccacggcgcagccagtcacccatctgccccagctgcagccagcgctgctgcagcggggtgtccgtgccggcctgcaagcggtcgtccagcgtgtccaggatgcgttccggtgccacggccgcagtcgggtccacccggacccagccgcgctggggcagccagacttcggcccaggcgtgggcgtccatgcgccgcactacccagtagtccccgatgcggttgcgggtgccacctgcgaagccggtcaccacccgggccggaatgccggcgttgcgcatcagcaccacgaaggccgagctgaagtgctggcagaagccggccttgtagttgaacaggaaatcgtcgaccggatcgcgcccggccaccggggtatcgagcgtgtaggagaagtcgcgggtgatccactgcagcgctcggtggacgatggcttcgtcatcgttgccggcctcctgccgccattgccgtgccagctgggcggtgcgcggattgaagccggggggaagctgcagcgcggcacggcgcaggtagggcgacagatcggtgtcgaaccgttgcggaggcgccgaatgcaaccgccagcggctgagcgcggacagcgtgcggtcgctgcgcaggctcatgtccgcatcgaaactgctgccttccggtgcgcggctgggcaggtccagggccaccagcaggcgacggtcggtgggttcgtagtcgatctggtagtcccatccctgtgcggcggctttgaccacgggggcggggcgccgggccgtcacgcgatcgcggctccagcggtggccatcgaaggaagtcagcaccgggccgcgccaatagcgctgcgcgggctcgggcaccgcgccgaagaactgcacgcgcagcgccggggtgtcgtcggccatcaggtccagccattggtccggcgccatgctgtcagccaggccgggtgtacccaccgctcgttcgggtacgccccacaacggcgtggacaagcgcgggaacagccagaagcaggccagtgccagcggcaggccgatgccaagcaggcggccgacgccgcgcagttgaccgtgcagtggcaggcgtgggctgcggccctcgtcctgggccaggcgttgcagggccagcagtgcggcaaccgcggccagcgcagccagtcccgtggtcagcgggccctggtcgagcaggaaggccgcgaacggcgagaacagcgcgaaaccgagcaggctgcgcgcatcacgcaggttgcgcagttcgctggatttgatggccagcatcgccgccagcagcgcacagccggtatcacgccccggccgcaccatgcccatctgccagacaatggtggcgagcatggccagcaccagcagcaggcgcaccggcatcggcagcacccgccgccaggaaagcgcagcggtcagcacggcggtgatcgcgatcacgacggccagcaccggcggcagctgcagcagcagtggcagcagcgccagcgctgcgctggccagggtccagctgcgggcgttgcgatcgagcaggacggcaggctcagtcatggggcatcagcgccagtgcgcgcaggcacaggtggtggtggctggcgccctggccgggcccgaacgggggatgggctggaagcagcagcgtgtagcgccggccttcgcgctcggccatgtcgacccagcgtgccaaccgcgcgatgcgtgcttcatggcccagcggcgccagcgtgcgccagtccagcaccacttcgatgccgatcggcttctcgtattcgcgtaccagcaggctgtcgcggcgtgccgagtgtttccaggcaatgctgcgcggggcgtcgccggcacgatagggtcgcagctggtgcagctcttcgccactggcatgggcgcgggtgtgcagtggatcgctgccactttccggaaggggtggtgccagtacctcggccagtggatagaccagcagcggctgctccggccacacccacgaccatgcccgcaccagccccagcggctgcgtgctggacaggcggatgcgcggcagttccagccagccgcggcgctcgctggggacatccagctccacttcgccgcgaccgtgtgcaggcagtgcgacccacgcctcgcttgcgcccagctgcaggtgcagcccgtggcgcgcgcgcgggtcgcgcaacgacaggtccacgcgcaggcgcagggggtgcccggccggaaccggctcggcggagattgcatcgatctgtatgccggacagctgcaggtgcgcggcaatggcgctggcgatcgctgctgcggccagtaacagggccagcagcagggccgggttgttgttgtagttcaatgcgcccagcagcatcgccgacagcagggtggcgacgaacaggccgaagcgcgtcggtagtacatagatgcgatggcgatccagtcgctgcggcagggcttcgggcctgcgtgggcgtgccagcagctgcatgcgtgcccagcgtgtggccaccttcagtccaccgcgacggtctgcaggatcgcccgcgccagtgccggcccggagctggattcggcctccgccaccaggcgatggccggccactgccacgaacagggtctgcacgtcttcgggcaccacatgcccgcggccgagcagcagtgcatgcgccctggcggcacgcagcagggccagcccggcgcgcggtgacaggcccacgcgtacgccggcatgctggcggctgcgggtcaacagtgcctgcacgtagtcgatcagcgcgtcgctggcgtgtacctggccaacggcttcacgcagcgcacgcacctgggtgtcatccagcttcggcaccgcgcgggcgatcaggtcgcggcgatcgctgccacgcagcagctcgcgctcggcctgcacgctcgggtagcccatcgccagccgcagcaggaaacgatcgagctgcgaatccggcaacgggaaggtgccggacaggtcgaccgggttctgcgtggcgatcacgaagaatggatcgggcagtggatgcgtctgtccatccagggtgacctgctgctcggccatcgcctccagcaacgcactctgcgtgcgcggcggtgcgcggttgatctcatcggccagcagcacgtgggtgaacaccgggccggggtggaactggaactggcggctgccggcctcgtacaccgatacgcccagtacgtccgccggcaacaggtcggaagtgaactgcacgcgctggaagctgaggccgaggctgctggccaatgcatgcgccagcgtggtcttgcccagcccgggcagatcttcgatgagcaggtggccgccggaaagcagggcgacaaaggccagcctgacttccggcaccttgcccagtaccagtgcgttcacctgatcctgtgcctcccgcagggcctggcgcagttgatcggttagcatgctgggattgggggacgaggctggcatgatcgtctcaggtctggaatccactcgattatccatagagcaatgcaaggcgaacagcgcgcgcgggcaatatttctctggttatggacgctgatcacagcggccaagctggtggtggctgcacgcctgccgctgttcgtcgatgaggcgttctattggcaggaaggccagcacctggccgccgcctattccgacctgccggggttgacagcatggcttgcacgcctgggcgtggaaatcggtggccatcacgtgctcgcattgcgcctgccgttcctggccatcggtgcgttgctgccgttgctggtggtgcgcatcgccacgcgctggtttggcaacgtcgcagggtggcaggcgggcagcctgaccctgctgatgccgctgtcggccacgctgggcctgctggccgtgccggatgtgccgatggcgctggcggcggtgatctgcctgcacgccggtgcgcgccttctgcacaacgtggatgcgtcgtcggcgatgaagctggcgctgggcctgctgatcggtgcgctcagccactaccgtttcattggcgtcatcggtgtcggcttcattgcgctgctggcgctgccgcagggccgccgcatgctggccgacccgcgcgtatgggtggcgctggcggtgggtgtactggcctggctgccgttgctggcgtggaatgcggacaaccatgatgccggcctgaagttccaggtggtcgagcgccacccgtggacgttcgagtgggaagggctgtggttcctggtgatccagccgatgctggtgacgccgatcctgtgcatcgcgatgtggaaggtcgccctggcgggtacccgcagcggtggtggtgtgcgggtgcaatggcgctatttcggcctggtgggcggggtgtcgacgctgggcatcttcctgctgggcttcttcaccgatgtcgagcggatcagtttccattggccgttgccgggctacctggcgctgctggtggccgtgccggtggtcctcaacggctggccacgctggctgcgccgcaccggctggtggctggcagctgcaggcaccgtactggctttcggctactacctgatggcgtccacgccggcgctgcgcgagcagatggccggcagcaagtactacccgcgcaactttgccggctggcagccgctggccgtggcggtgcgcgacgaactgcggcagatgccgccgggcacgcgtgtgctggcgggcaacttcaaggtcggtgccgaactgggcttccagctgggcaacggtaatatcgaggtgttgccgcatccgctcaacgacaagcatgggcggaccgcacagctggcacagtggggcctgctgcacgaaggcccgcgcagtgcgccgatgctgctggtgctgtcacccagcgaccagcgctaccgcgatctgctggcgcgctatcacgccatctgcgagcaggtggggccgttgccggcgccgcgcgtggtcagcagcgatcatggtttccagcgcttcctgctgttccagctgccggtgcagcgcgcgcaggggccctgcgtgacgccggcaatggcctggctggatgcgccgtccaacggtgagaaggtctccggaacgctcgccatcaagggctgggcattcaaggatggcgtggggttggcgcgcatcgaagtgctggtcgatggccattcgattggcgatgcgcgctacgggcgcatgttcgacatccgccacacctggccggacagcaccgatccgcaacatccggcggtgggcttcgacgcatcgctggataccaccacgctggcgccggggcggcattggcttggcctccgcctgcacggccgcgacggcagcgtggaggcgtggcaggagcagccgttcgaagttcgttgaggtcccctggtcctgtagagccgagccgatgctcggctgcttctgctacagatggcgggcagcctaaaaaaaagacggccgagcaagggctcggctctaccgttcacggcaccgcgaatccagccctgcgcagcaggccgcacaccgcgatcagtggcaggccgaccagcgcggtcgggtcgcggttgtcgattgcctcgaacaggctgatgcccaggccctcgcacttgaagctgccggcgcagtccagcggctgctcggcggcgacgtagcggatgatttcctgcgggtccagcacgcggaagcgtacttcggtcagatccagggtggcgagggattctccatcccgcctgagactgattgccgtgtgaaagcgcaccgtctgtccggacattgccgccagctgcgcacaggccgcctcgaccgtgcccggctttcccagcggctggccgttcaggtcggccacctggtccgagccgatcacccaggcgcccggatggcgggcggccacgtcggcggccttggcggcggccaggcgcgtggccagggccagcggggtctcggcgcccagaggggtttcatccacgtccgggcgtgcgcagtcgaagggcaggcccagccgttccagcagttcgcgacggtagcgggaggtggaggccaggaccagtgacatgtgacaataccggggcagggcgcggcagtctggcccctccacggcgccagcggcaagtcctgcagggcgggcatttgacagcgggcggtgcgatccttagtattcagcggcttatgtccgcgaacgtgcccgaaacgctggatgcctggcggatggttgtagcgcgaaggcgcttcgacggtcaggtgtccctggctgaattgacccgcctgcaggggttggtcgcagataccgacggcgagtgtgtctactcgcttgaattcggtcgcgacgacgtcttgcgggtatcctatgtggaactgaccatcgacaccgcgctgccgctgacctgtcagcgcagcatgcagcgattcctgttgccggtgaaggtgacccagaggcttggcctgatccgcgacgaggacgaggaatcgtccctgccggaggagtacgaggcgttgctggtgccggaagacggccagctgcgtccgctggatctggtcgaggacgaattggtgctggcggtgcccgtggtgccgctgtcgcccgacggtgaggcggtcgacaaggactgggcaccgagcgaagaagaagcgaagaaggccaacccgtttgcggcgttggcagcactgaagaaacaatagcagccggattgtcgtcggcggctgcggcgaaagcgaaagtgtgctgggcgctggcgtcctgcgcgacgatacgacgaagcaaatcgaaccgagtttggagcaatcccatggctgtgcagaaatcccgtgtcaccccgtcccgccgcggcatgcgtcgtgcccacgacgccctgagcgccaagcagctgtcgaccgacccgaccaccggcgaagtgcacctgcgtcaccacatcactgccgacggtttctaccgcggcaagaaggtcatccagaccaagacctcggccgtcgaagaagattgatgtgccgggaaggccgctgcctccgggcagcggcctttgccttctttcccgggcgtgccggtgatcggcggcccgcgcaacaggaaacatgatgagcaagcggatctattcgaggatcgcgggcaccggtagctatttgccggaaaaagtcctgaccaacgccgacctggaaaaaatggtcgaaacctcggatgagtggatccagtcgcgcaccggtattcgtgaacggcacatcgcggccgaaggcgaaaccaccagcgaccttggctacaacgccgccctgcgcgcgcttgaagccgcaggcatcgatgcctcgcagctcgacatgatcgtggtcggcacgaccacccctgatctcattttcccgtccaccgcgtgcctgatccaggccaagctcggtgtggccgggtgccccgccttcgacgtcaacgcagcctgttccggcttcgtgttcgcgctgggcgtggccgacaagttcatccgctccggcgactgcaagcacgtgctggtgatcggcaccgaaacgttgacccgcatggtcgactggaacgatcgcaccacctgcgtgctgttcggcgatggcgccggcgctgtcgtgctcaaggccgacgaagacaccggcatcctcagcacccacctgcatgccgatggcagcaagaaggaactgctgtggaacccggtcggcgtttcgaccggcttcaaggacggcgccaatggtggtggcaccatcaacatgaagggcaacgacgtgttcaagtacgccgtcaaggcgctggactcggtcgtggacgagaccctggccgccaacggcctggacaagtccgacctggactggctgatcccgcaccaggccaacctgcgcatcatcgaagccaccgccaagcggctggagatgtcgatggatcaggtcgtggtgaccgtcgacaagcacggcaacacctcctccggctcggtgccgctggcgctggatgccgcggtgcgttcgggcaaggtcgagcgtggccagttgctgctgctggaggccttcggcggcggcttcacctggggttcggccctgctgcgctattgatagtgcaagttacgacaatgtgaagtcttgtcgttacggcccctccggggccgtaacgcgtttaaggaggacctgtcatggttgagcccatcgtcatcgaagggcaacgtgcctggctgaagcagtacggcaagggaagccgggcaatggccctgggcctgctcaattttgttgcgcgccgtttccatctggatgcgctgcgcccgccgccgcaccgcggtggcgacgccgcacgcgaaaccgaggcccgccgcctcgcggaactgcaggcgcagggtgtgaacgtgccggacgtactgggcaccggtcatgccgctctggtgatcggcgacaacggcagctcgttcaatacctgcctgcgcgaagccgacgaagccggtcgcgatcggctggtgatggcggcgatgctggccattgctgaagctcatgcccgcggcgcctatttcggccagccgttgccgcgcaacctcacatgggatggcgagaaggtcggcttcatcgatttcgaggaagatccgctggaagtgatggatctgtccgaagcgcaggcccgcgactggctgatgttcggttacggcgtggccaagtactacgccgaccgccccgggcacctgcaggcgatgatggccgaggcgatgggtgacgttcaggcgccggtgcgcgagcacgtgcatgcggtcagcggccgcctgcgcagcctggcacgggtctgcatgaagctgggccgttcggcgcgcgcgctggcccattccatcttcatcgcccacggcgccagcaccgccggcgtgttgatgctggtgggcctgtgcgtggatttcctcgccgacggcgacctggacgtcctgcagctgttctgctgatggctgacaggggtcagatcccttttcctgcggaaaagggatctgaccccgttacgcttgcccggccgcgctccatacgcctgcatacgcgcacgtacagacgacacggcatgttcccccttatcatggcccgcttcgattgcaacaagcggatgaccgcgtgaccgtatccaccctcgcttttgtcttccccggccagggctcgcagtctgtgggcatggtggccgagctggccgagctgcacccacaggtgcgtgaagccttcaccgaggcatccgatggtgccggcgtcgacctgtgggcgctgtcccagggcggcccggaggaaatgctcaaccgtaccgaatacacccagccggccctgctggccgcgagcatcggcgtgtggcgcgcctggaacgccgtgggcggtccgcgcccgtcggtattggccggccacagcctgggcgagtacaccgccctggttgccgcaggcgcactgagcctgcatgacggtgcgcacctggtgcgcctgcgcggccagctgatgcaggaagccgcaccggccggtgtcggcgccatggctgccgtgctcggcgctgaagaccagctggtgctggacgtctgcgccgaagcggcaggcagccaggtggtggtgccggccaacttcaattcgccgggccagatcgtgatcggtggcgacgccgacgcggtcgaccgtgcgctggcgctgctggccgagaagggcgtgcgcaaggcggtcaagctggccgtcagcgtgccctcgcacaccccgctcatgcgcgaagccgccaaccgcctggccgaagtgatggccggcctgtcctggcacgcgccgcagctgccggtggtgcagaacgtcgacgcccaggtgcacagcggcatcgacgcgatccgcaccgcgctggtccagcagctgtaccagccggtacagtggaccgggtgcgtgcaggcgctggctgcccatggcgtcacccggatcgccgagtgcggcccgggcaaggtgctgaccggcctggtcaagcgcatcgacaaggccatcgacggccgttcgctggccacgccgggcgacttcgaagccgcccgcgaggcatggtcggcctgatcccccctgttcctgccgaccgtaccggtggccgcggcaagcggcacgggtgcggcggtcgccccagcctgaggaaaacatcatgagcaagcccctgcagggtgaaatcgcactggtcaccggcgccagccgtggcatcggtgccgccatcgccgatctgctggccgcccagggcgccaccgtcatcggtaccgccaccactgaatccggcgctgccgcgatcggcgaacgcctggccgcccacggtggtcacggccgcgcgctgaacgtcaccgatgccgccgcgctggacagcgtgctcgatggcatcgccaaggaattcggcccgatctcgatcctggtcaacaatgccggcatcacccgcgacaacctgctcatgcgcatgaaggacgaggactgggcgtcgatcatcgacaccaacctgaccagcgtgttccgcaccagcaaggcggtgatgcgcggcatgatgaaggcgcgcaagggccgcatcatcaacatcgcatcggtggtgggcgtgaccggcaatgccggccaggccaactacgccgcggccaaggcgggcatcatcggcttcagcaagtcgctggccaaggaaatcggttcgcgcggcgtcaccgtcaatgttgtcgcacctggcttcatcgacaccgacatgaccaaggcgttgccggaagaagcgcgcaccgcgctgatcaacgacatcgccctcgaacgcctggggtcgccggaagacatcgcccatgcggtggccttcctggccagcccggctgccggttacatcaccggcgaaaccctccatgtgaacggcggcatgtacatgccgtaagcaaggggcgcagggattgcgccgcaagtggttgatctgcggaggtttttgctgcaatgcaaggccgcgccggtttccactacactatcccacggccatcgcctttgatggcgaccacttttgaaccacaactccatctggagcgagatcccatgagcaccatcgaagaacgcgtcaagaaaatcgtcgtcgaacagcttggcgtcaaggaagaagaagtcaccaacagcgcatcgttcgtcgatgacctgggcgctgactcgctggacaccgtcgagctggtgatggccctggaagaagaattcgagtgcgagatcccggacgaagaagccgagaagatcagcaccgtgcaggccgccatcgactacatcaaggcccacgtcaaggcctgatgtcagacggcagtgcgcgcgcgggcccacgctcgccgcgcaccgcaccccatggggccgcagttgcggccccgtgtgtttgagcatcacaccgaagcaaaccgcgttgcccgttgaaatcagccgggccaggagaatcagcaatgaagcgtcgcgtcgtcgtaaccggcctgggtatcgtctcgccgttgggcaatgatctggccagcagctgggaaggcatcacccacggtcgttcgggcatcggtccgctgaccaacgtttctgatgcctatctggatcggttcaccaccaagattgccggtgaggtcaagggattcgacatcaccgccgacaatgaactgttcggcaagttccgggtcagcggcaaggatgccaagaagatggacccgttcatccattacggcctcggtgcctcgttcatggccctgcacgactcgggcctggagatcaccgacgccaatgccgagcgcatcggcgccatcgtcggcgccggcatcggcggcctgctcggtatcgaagagcagaccatcgagttccacgagggcaagaagatctcgcccttctacgtgcccaagaccatcatcaacatgctgccgggccagctgagcatcatcaccggcctgaagggcccgtcgttctcggcggtgtcggcctgcgcgacctcgaaccattcgatcggtaccgcgatgcgcatgatccagtacggcgacgccgacgtgatggtggttggcggtgccgaacgtggctcgtcgccgaccgcgctgggcggcttctgcgcgatgaaggccatgagtacccgcaacgacgccccggaacaggcctcccgcccatgggacaaggaccgcgacggcttcgtgctgggcgacggcgccggcatcctgatcctggaagagtacgagcacgccaaggcacgtggcgcgaagatctactgcgaactggccggcttcggcgccagctccgacgcgtaccacatgaccgcaccgagcgagaacggcgaaggcgccgcgcgctgcatggtcatggccatgaaggacgcgggcgtgaccccggaacaggtgggttacctcaacgcgcacggcacctccacgccgctgggcgacctgggcgagaccatggcgatgaagaccgccttcggcgaccacgcctacaagatgatggtcagctccaccaagtcgatgaccggccacctgctgggcgctgccggcggcgtggaagcgatcttctcggtgatggcactgcaggacaacatcattccgccgaccatcaacctgcagcagccgggcgaaggctgcgacctggactacgtgcccaacgaagcacgccaggccaaggtcgacgtggtgatgtccaatggtttcggcttcggcggcaccaacggcacgctggtcttcaagcgcgtctgaccgagttgtagcgtcgggccatgctcgacgccgcgttctacggagccgccgcaaggcggcttccgtgcatctgaaccccagaactggctgccatgacccacgcaccgctgatccacccgctgccgcacccgatcgatctgctggccctgcagcagcatgacccggcgcgctttccgctgctgatggaatccactgcctcgggcaccgcgcagggccgctggagcctgctgctggccgcgcagggcgatggcctgcgactggatgcggatggccaggtgcgcgaccagcacgacgcggtgcacgccggcagcttcctgcaggtgctggaccgtgcctggcagcgcgaacgcctgccgcatgacggcagccacagcctgccgttccgcggcggctgggcgttgatgctcgattacgaagtggccagccagatcgaaccggtgctgccggcgcgtgcgcgcgaggacggccgcccgaccgcgctggcgctgcgctgcccggccgcggtgctgcatgaccatcacaacggcgccagcttcgtcatcgccgaggccggcgagcaggcgttgctggatgcgctggtggcactggcctcggccgcgctgcccgaggccgggcagggctggcagccgccgcaggcggtgggcgaggatgcgccgcagcgcttcaccgacggcgtgcgccgggtgatcgagtacctgcgtgccggcgacgtgttccaggtgaacctgtcgcggcgctggagcgcgcagttcgctgcgccggtcagcccgcaggcgctgtacgcgcagctgcgccgtgccaatccggcaccgttcgccggcctgttcagcgcccacggccgccatgtggtcagttcctcgccggagcggctggtgtcggtgcatgccggccacgcgcagacccgtccgattgccggtacgcgtccgcgcttcgagggggacgatgatgccgcacgcatccaggagctggtcggccaccccaaggagcgtgccgagcacgtgatgctgatcgacctggagcgcaacgacctgggccgcatctgcatgcccggtaccgtggtggtcgacgagctgatgaccgtggagagctacgcgcacgtgcaccacatcgtcagcaacgtcagcggccacctgcgcccggaggtcacgcccggcgaggtgatcgccgcgaccttcccgggcggcaccatcaccggctgccccaaggtgcgctgcatgcagatcatcagcgagctggagcaggtgccgcgtggtgcctacaccggcgcgttcggctggctgaaccgcgatggcgacctggacctgaacatcctgatccgcaccgccgaagtggatggccaccaggtcagcttccgcaccggcgccggcatcgtggtcgattcggacccggacaaggaactggacgagacccgcgccaaggcccgcggcctgctgcgcgcgctcggccagcagggctgatccggtcggggtcggatcccttgcgcaccgcgcgagggctctgacccccgcagtcatgccgccgggcgttcatccacgcatggcgcggatctactgatcgaccgttggccggcacgcaggcgccacgccggtcatgaccccaatccaccggcacggtatcctgcacgacggaatcgagttcagaggtagtccatggcgggagccaagcgcgggtgtctgttcgtggtaacgctggtggtggtgctggccgccgtcgtggcgggcgcgggcgcgtggttcttctaccagcagacccggttcgccgatgccccgatcaccccgaccgccgagagcgtggtcatcgccagcggcgatggcatgaacagcgtgctgcgcaagctgcgcgacgccggcgtggacgagggccaggacacccagtggcagctgttggcgcggcagcttgatgcggccggcaagctgaaggtgggcgagtacgcgctcggtggcgagctgaccccgcgcgagctgctgttgcgcatgcgcgccggcaaggtgctgcagcaccgcgtcaccattgttgagggctggaacatccgccagctgcgtgccgcgctcaagcgcgccgagccgctgctgcacaccaccgacaacctggatgacgccgcgttgatgcagcgcctcggcttcggtggccagcacccggaaggccgcttcctgccggagacctacgtttaccagcgcggcgacagtgatctggacgtgctcaagcgcgcccacgccgcaatggaaaaggcgctggacgaagcctgggaaagccgcgcgccggacctgccgatcaacacgccctacgaactgctgacgctggcgtcgatcatcgagaaggaaaccgcgctggccagcgaacgcccgcagatcgccggcgtgttcatgcgccgcctgaagatcggcatgcgcctgcagaccgacccgaccgtgatctacggcatcggtgccgcgtatgacggcaacatccgccgccgcgacctgaccaccgatacgccgtacaacacctatacccgtgcgggcctgaccccgaccccgatcgccatgcccagtcgcgacgcgctgatggccgcggcgcagccggccgccggtgatgcgctgtactttgtcgccgttggcgacggcagcggcgcgcacgtgttctcgcccagcctggaccagcacaacgccgccgtagcccgctacctgcagcagctgcgccagcaacgtacccaggagaccccggcgcaatgagtcccgcgctgcttcgccacccgcgtttcgtcagcctggaaggcggcgagggcgcaggcaagaccaccgccatcaatgccatccgtgactgcctgcgccgccacggccacgaggtggtgctgacccgcgagccgggcggtacgccactggccgagcgcatccgcggcctgctgctgaagcccgatgccgagatcgctgccgaaccgctcagcgccgaagccgagctgctgctggtgttcgccgcacgcgcgcagcatgtgcgccaggtgattcggccggcgctgcagcgcggtgcctacgtgctgagcgaccgcttcaccgattccagctacgcctaccagggcggtggccgcgggcttgacccgcagtggattgccgacctggagcgccgcgcggtcggcctgctgccgggcctgaccctgctgctggacgtggacgtggccgtcggccgcgcgcgcgccaacggccgtgacctgtggccggaccgcatcgagagcgagcaggacgatttcttccagcgcgtgcgcgccgtgttccgcagccgcgcacagcaggacccgcagcgcttcgcgctgatcgacgccggccaggtgcaggaacgcgtggccgccgatgtggtcgcacatgtcgagcgttggctgcaggacggggagggcgcatgagcacgttttcgccgtggcagcagcgcgcgttcgaccagaccgtggccgcgctcgacgccggtcgcctcggtcatggcctgctgatctgcggcccggccgggctgggcaagcgcgaggtggcgctggcgctggccgaccacgtgctggcgcagggtgatgcaacgcacgccacgcgcacgcgccagctgatcgccgccggcacccatccggacctgcagctggtcagcttcattccgaacaagagcggcgacaagctgcgtaccgagatcgtcatcgagcaggtgcgcgagatcaccgaaaagctggcactgaccccgcagtacggcgtggcgcaggtggtgatcgtcgatccggccgatgcgatcaaccgctcggcggccaatgcgctgctgaagaccctggaagagccgcagcccggccgctacctttggctgatcagcagcgacccggcacgcctgccgcagaccatccgcagccgttgccagcgactggaattcaagctgccgccgcagcacgaagcactggcctggctgcagcagctgggccacagtgaagcatcggcgcgcgaagcgctggaggccgcccgcggccatcccggccaggccgacaactggctgcgcgaagacggcctgagcctgcgccgcgaagtcggtcgagatctggaacagctggccgccggcaagaccggcgcggtggagctggcgcagaagtggtgtggtgatgacaacgcggcgctgcgcctgcgcttcgctgccgacctggcgctggcccaggccagcaccgatgccttgaccacgccggagcgattgcacaagcttgcagcctggttcgatgcggccaaccgcacccgcgacctgctgcgcaccacggtgcgtgcagaccttgcggtggtcgagttgctgctggcctggaacaaggtgaacgagcggcctgccgcaaggggaaatcgatgagtgccagcaacgcccgccagggcatcctgtccctggctgtgaaggacaaagccgcgctgtacagcgcgtacatgccgttcgtgaagaatggcggcatcttcgtgcccacgcccaagcgctacttcctgggcgacgaggtgttcctgctgctgacgctgcccgattccagcgagcgcctgccggtggccggcaaggtgatctgggtgaccccggccggcgcgcagggcaaccgcaccgccggcatcggcgtgcagctggccgacggtgccgaaggcgagggcgtgcgccacaagatcgagaccctgctggccgggctgaccggctcggacaagccgacccatacgatgtgattccggtagcgtcgggtcatgcccggctgcgtgccccgaaatgcccgtgaacacgactgtgaaaaactgttgacggcctctgaaaagcccctataatgagcggctcagcaacacaccgggcggttagctcagcggtagagcattgccttcacacggcaagggtcacaggttcgatccctgtaccgcccaccaaatagtagacctgacttttcaggtgttatgaagaagccggctttcagccggctttttcgtatgcgcagagtaagtgcatggaggtcgtgtcggctccaagtaaccggtgactcgccgtcagattgatatgggactctactagcttaccctggcccgctttgactttttccctagcgaaaaggcttgtgcgtacatagtcaagcaggtctctgcgttcgattacccgctccactatcacctgtacgctttcgtactcgaaacccttcgtgaactccactatccgtgtccttgcaagtcgatggtcgaagttcgaggacgtctggatgaccgattttaggttcagcgcttttcgattctcattcgattgttgagcgcagcccgacttcagaggccgatcatcgccgattgcgataccgtcgtcgctttactagctcaaatgcagatatggcagcaaagaaaactgcatacgccgcccacaatctgaatgatgcgcgaaagggatgcggatttcctgattgaatcgcaatgaagtagagggcgccaagaacgagaatgcccccggcttggtatgcgagaaagccacgtagtactggattcacttcttcttctccatcgtcttttgtgccgcatctacggcggctccggcggtgctctgccctagctgtgatgctcccgcttgtgtgatcgactgacgaggaattgcgactcctgttgatgcggtggtggaggcgatgttcggggcgccgggagatgcggagctgctcagcctattcagagcgcctttggcggctggtcccgcgaagtcgcctgctgcagctgcaacaccggaacctgccagaccaccaacagcgcctccggtcgctgccgtgagcactccaccagcggaaatcggctctcccttgagggcgctctctgcggcggcaccggcgccgccagtgacgaaattcgccgctgcttgaatggcaacggctcggccgacagaaatcactccagactccacggctgcgacagcgataccgcccacgccgcctgagaccgaacccacccctgctgctatcaatgcctgcgtctgatcgattggtttatccggattcatcagcttctggatggcaatattggacaggccccccgctatcgcgccatagatgaatggcagggctggatttcgcccatctggatcagtgaatttgtacggattcccgttggcataccgatagcgattgaactggcctacaggctggtcatacgctgagaccgggtccactgagaggaagactcccagctccggatccatgtatcgctgttgcatgtagctcaagcccgtagtcgagtcgctcacatgccctgtgtatccgggtccgtcggtgacctgtcctcctaccagggtcccatagggctcgtagtcataacgctttatcacgttgccgttggcgtcgctctcagcaacaagggagccaagggcgtcggtatgaatgtaggtaaccgtctccggaccttcagcgttcgcggatggaggcaggccaagcccaattggcagcgcaatgtgtagccaagtacttgctgcaaccagtgttcggagacgaactccaacccttgatgcgcaggcggattcatcgcccgcgttccttttgaatgtatgcatcctttctttccccgaaagcgctgtccaagatgacttgactaggcagtatgaccgtggcgttcgtgcaccgatccgagtggatcatataccgcaatggccgccttcgctgggtagaagagccgcgtccatccctgtgccacctaccatgttgcagaacaaaaagggcctccagcaatgggccatctttgctgcgcgtgcatcagccaggtcttcctgccgcgaatcccatggcatggcctagcccatcctgtgcagcgcgcgcgatctggcgtgcggcaacgatcaatccgtcccgatggaagtcaccgagttgatcctgcggatcgccatccaggcgcgcacgttcggcggcatgcagtagatccagtacggcattcaaagcggccagcgagcggtcgagcgagccgaagcctgtggcgctgagtgtctgcggggtacatgcgcgcccggcttggtcatcaccggcgcggatggcatcgaggcaggaaaggaacgttgggcgcgaaggcggcagcagtcgctccgctagagcgcattcgatctcacgcgcaaggtcttcgggcacgtcggctgcgacgtcgccgataagcgcgtgcaggcggggatggatggcggttcggttggtcatggcgaaaccctcactggcgtagggccaccttctggagtgaaggtggcggacggtgcgggttggcgtgccaaggcaaacaagcttcaagggagaagaacgcctggcggatcttgcgatccccacgcaccgcccgccattgagggcagtcggtgcattctctcaactgcgatttctctcgcagtccttgaagcctgttcgtttattcgagacgccaatcccggccaaggcgtcttgcctcggcgcggcgatcttcaagccgggccatcacatcagtctgtaaggaaagttctcaactggccctaggcaggccagacgttttccgatgtgtgccgtcggacacctgcgagtagtgcggcccatcactgatggcgcacatcgccgcccctgccgaccgtgcacgagacgactccagagcggcgccgccacggcaatcgcgtcaccctgcgcggcgaggcgggaccatgccacgcatggagccagagggttccatccctgcgctgtcccgccgccccgggcaggcgtagtctcagcccgttgccgtgcccatccactctggagtgccaccatgccgctcgcccgcatcgatcttcgcaaaggtaaatccgccgactacctgcaacgcgtcggcgaaaccatctaccaagccatgcgcgcggtgggggtgccggaaaatgatcgcttccagatcttccaggaacacgcgcccggcacgctgatccacgaccccggctacctgggcgtggatcgcaccgacgacttcatctgcatccagatcacctggaacgaagggcgcacgctggagcagaagaaggcgttgtacctgggcattgccgatggcctgcatgcggcggtgggtatccgccgcgaggatgtgttcatcaacctggtggaggtgaagaaggagaactggtcgtttggcaatgggcaggcgcagtacgtgagttgatgcgggaacggtgcctgcgcctcacgcggtttggtcaggccatgcgcggcgacgcctgctgttgtgcctgttgctcgtcctgcgccagccggcttgcgtcgcgggattgctgctgcacgttgacctgctgatacagcgtgtccgcgtcgccctgctgcgtatcgagcagggacaggcgctggcgattggcggcagggtccggcgaggcggtgtcgccgctgcgatgcaggaatacgtagccgggtgcctcggcggtgctgtttgaactgaatgccacctgcagcgtgtccttttcgctgaagccggcctgcaccgccgcgtgggtcagatggccggccagtcgttcgtgctcctgtccggggggcagtccctgctgttcgctggcctgggcgagtgcggtacgcactttctggtccaaggcatgaaggctgtgccccggtgcgcgcgcgtccgcagccagacgctcgcccaaggggccatcaataccatcggtttcgctgagcagacgctgcttcaagctgcgctcgggcaggggatgggtggtggtgcggttgagttcgctgttggggaagggcggttcaatgctgtccacgccatggatgttgcgcagggggcgataaccgtccttgccctgtgactggacgcccagcggaatgcggacgtctggcagcaattggccgacggggccgccgatgctgttcacgtccaggctgtgcttgcgctggatgccggcatgattcaatgcgtcccaggtgaagtccacgcagttgtgacgcacgtcggcgtagtgcttgctgaagccgtgcgccactggatcgtcgccgaacgccttgagcttgttgtactgggcttcggtgatttcgatggtacggacatgggcggggtccttatagactttcacgtcgtctctgacgatgcgcccgggaccattcatgctgccatgctcgacgggtgcgaagccgaaactctgcgccgctttacctggagcgtgcagaacgtagaacatgtggccaggcccggaagtatcaggagtgccatcgggcgtcagctgctgctttcccgaatcgggatcgagcagtggggtgccgggtgcggcaatgacaatgtccaggctgtagcggggcttgttcatggaaactccttcgttccttcgaatgaatggtgtcacttccctgcaggacgcgaggcgtgcacgactagccttgccgaatagtcttgcagtcctgatatggcatggaccgtttgaatctgcagccggtatctgctgtcgagctccagcggcagcgctgtcacgttcaggaggtagctgccgtcgctgcctgatgcgagcgaggcatagcgccagctctcagagtggtgccacgaggggagcggctcaacaccgttgcgcgcgcgtgcctgatagctgtcctgtgttgcaatctcctgccaggtagtacctttccgacgctgcagggatacttcgaatgggatgttgatacttgctatatcgggcgtgcccgttgtagctggacttcgccgctgcagttccagttccaccgcataagtgcggtagctggcaaaattgcgcgccgtggtttcgaactcgaactgcacctgctggcccggcgtgtccacggcgatgggctgtgagagttccagcggctctggcggtgggggcggccccttgtcggcacaggcggcaagcaacgcggtcaggccgagcaggctgatgcgcagccggtgtgtgatgcgagtggtcatgcggatccctctggctccttgccgtggccatctgaaccctaacgttggcgaggcggggcctgcaagcgtagggaccgcggtgcggtgcattcacatgtcgccgctggaggcgagcccctgcgtcaccgtgtcgcaggggccaaaccctgaacggggtccaaggttggctatggccccgtagaatggcggcgtgcgccattctgttctccaccgccggttccaggccctggcatggcttgccatgctgctggtgctgctcgccccgctggtgagccgctggctggcgcatggtcacgtggctgccgctgcgccggtggcggccatggaccacgcaatgcacgcagagcacgcgctgcacgcgatggaagggcaccacgaccatcacgcaatggccatgccgcacggcggggccacgaagaagccgcccgccgatccacatgccgatcatgagatgggtgtggactgcgattactgcctgatcgctgcacggctgatcaccctgctggtggcggccgtgctgctgttggcgccgatggcaccggtgtgccgcgcactgcgcggcgcggtgcgggcgttgccgcaacggatcagcggcacattgggcgcgcgtgggccgccggcactgatggccgcctgagccgcacgcgcgctgtattgaacgttcttccatgaggttgccggccacggccggtgcccgcacgcgcgtgtctgtccctttctgattgctgccctgccattgcggggtggccttgcatgccgtgaaaaaatgaaaacgaaccccaactccgcgcgcctgcgccgggcgacgctgcctgtcctgtgcgcgttgctcctgcacaccgcccccgtacttgccgctgacgcggccccaccgaccacgctggataccgtgcgggtggtcgatacccgcagcggtgaactgtcgtccaccgccagcgcgggctctgcgttgggcctgagcgtgttgcagacaccggccagcctgacggtaatttcgcgcgagcagctggagcagcgcggcgacagcaacctcaacgatgcgatcagccgagcgggtgcgatcagtgccatgccgcatccgggcaatggcctgagtgcgctgtccagccgcggcttcaccgacggtgcctcggtgatgcggctgtacgatgggctgcgccagtacggcggcgtgggcatcacgttcccgttcgatacctggtcgatcgagcgcatcgaagtgctgcgcggcccggcctcggtcatccatggcgacggtgcgatcggcggtgtcatcaacatcgtgccgaagaagcccacgcgtggggcgatcgagaacgagatcagcgtgaccgtgggcagcgaggacaccgcgcggctgggcttcggcagtggtggcgcgctgacgcccgagctggcctaccggctggatgtgagcggcaactacagcggtggctgggttgatcgtggacgcaacagcgacgcgacattctccggtgcgttgctgtggcagccacgtgcggacctgcagctgatgctcacccatgcgcagggctaccagaaacccatgcgctacttcggcacgccgctggtcgagggccgccagctggaggcgctgcgccaccgcaactacaacgtggacgacagcgagatccgcttccgcgaccgctggacccagctcgacgcgctgtggacaccaaacgcgaacgtggaatggcgaacccgcgtctaccagatcgacagccagcgtgattggcgcaatgccgaggcctatgtctacaaccgcgctaccggcttgatcgatcgctcgggcaataccgagatcacccacaaccaggaccagaccggactgacctcgacgctgcgtgtgcagggaacggcgggtggcctgcagaacaacttcgcggtgggcctggacgccaaccgcgcgcacttcaagcacaccaacaacacctatgccggcagctcgggcccggtcgatccgttcgatcctgtcccgggccagttcgcgagcgacgcgccgaacctgccgcgctaccgcaaccgtgccgagcagtacgcgctgttcgtggaagaccggctggcgctgagcgagcgctggtcggtgctgggtggcctgcgccacgaccgcgcgcgcattgatcgcaccgatctgatcagcggccagaacgcgttctcgaagacctacagcagcacaggctggcgtgcgggtacggtactcgcgctgcagccgacgctgagcctgtatgcgcagtattcgcaggcggcggacccggtcagtggcctgctgatgatcagcccggccaacggcgcctttgacctggccaagggccggcagatcgaggtgggcctgaagcaggccttcgacggtggcgagtggacgctggcggcgtatcgcatccgcaagaccgggctgctcagccgcgatccgctggtgccggatcgccgggtgcaggtgggcgcgcagacctcgcgcggtattgaagcgtcgttgaactggaacttcgcgccgcgctggtcgctcgatgccaacgcgacggtgctgaaggccgagttcgaggacttcctggaaaccacgggttcgccgccgatgctggtgtcgcgcgatggcaacgtgccgccgaacgtggccgagcgcctggccagtgtgtggctgagctggcagttcgcgccggactggagcgcggcgggtggcgttcgctatgtcggcaagcgctacgccgataatgccaacacgctggagttgcccggttacagcaccaccgacctcgccctgacctggcaggcggcaccgcacacgcgattgtccgcacgcctgttcaacgtgttcgacaaggcgtactacgccaccgcgtactacaccagcacgcagtggctgctgggggcggaccggcgcgtcgaattcaccgtcgaccatcgcttctgagggcgctggcgatgacgatgcgttccaccgccaagcgctggacctacctggtgcatcgctggctgggcatcggcggatgcctgctgatgctgctgtggttcgtcagcggcatggtgatgctgttcattggttacccgaagctgacgcccggcgagcggctggcggcgttgccggtgctgggtgaggcccgcgacctgcaggggctgtcggtactgcctgccgccgtgcaggccgagccggaggctgtggcattgaccacgctgcgtggcgagccggcgtatgtggtgcgcagtggcagcaacgtgggcgcctggtctgccgtgaccggccaggcgctgctgccggtgtcggcacagcgcgccgaagcatccgctgcgcagttcgcgggcggccaggccttcgtgggtgcgatgcgcgtgaatgaggatcgttggacgcattcgcgtgcactggacgcgcatcggccgctgtatcgggtggaggtgggcggcgcgcagccgggcgacctgtatgtgtcctcgcgtaccggtgaagtggtgctggacgctccgcatgtgcagcagcgctggaactatgtgggcgcctggctgcactggctgtacttcctgcgcatgcagtcggtcgacccggtgtggacgtgggtggtgatcgtgctgtccgcactgtgtacggtggcggcgatcagcggcatcgtggtgggcgtatggcgctggcgtttccgtgggcactatcgttccggtgcgaagacgccgtacgtggagtcgtggatgcgctggcaccatctgatcggattgtgtgctgcggccttcgtgttcacctggattttcagcggcctgatgtcgatgaatccattgggtgtcttcagcagtacgggtgaagcgatcgatgttgagcactaccgtggcggcgcggtggcggtggatggtgcgctgggtgatcctgcgaagcttctggcgatggccgaagctgcgcgcttccagccggtggagatccagtggcgacggatcggtggtgagctgttcgcggtgttgctggacgggcagggtgatacgcgcatcgtgtccggcggcaatgggcacctgcatgtcgcacggtggctgccgaccgcgtggttgcagcagagggcacgtgcgctgtccgctacacccatccagggtttcgtggtgcagcatgcagcggatgcgtacttctacccgcgtgcgcccgaggccatgaatggtgcagcggtacgtcgcttcccggtggcagtggtggatttcggtgatgccgaggcgacacgcgtctatctcgatctggcgaccggcgatccgttgctgacgatggggcatcgtgagcgggtggggcgctggctgttctacttcctgcatagctgggacctgccggcgatgctgcgccaggaaggtgcccggttggcggtgttgctgctgctgagcgctgccggcaccgcgttgtgtgccacggcgacggtgatcggctatcggcgattgcggatgaagctgcggcgcaggcggcgctgatgccctgggctacacccgcagccaacgcgtggacatcgccaccagcaacaaggccgtggccacgccgatgaatgcagcgatcaggccgaagtggttggcggcaaaaccgatcagtgccgggccagcaaggatgccggcaaagcccagcgtggaaacggcggtgatggccagcgcgccgggcatgcgggtctggtggccagccagcgagaacagcgccggtgcgatgttggcgcagccgaggccgaccagcacatagccgatcagcgacgcctgccacggcgtgaccagggtcagcaccagcacgcccgcggcggcaagcaacgcgccgaacacgatcgcgcgctggcggcccacgcgtgccaccagtgcatcaccgaacaggcgtgcgacggtcatggtcagggtgaaggtcacatagccgatgccggcgaggccggcatcgacgcggcgcacgtcgctgagaaacaccgcgctccagtcgagcatcgcaccttcgccgaggaaggcgacgaacgccagcacgccgatgaacagcacgatgccgtgtggcagggccagcatcggtgtgtcatgcggcatgcgttcgctgtgccagtacgacgccgacaacagcatcaccagcaacatggcgccgacgccgaccagcacggatgccaagggcggcagctgtgcggacagcagcacggtcatggtggccgcgccgaggaagccgccgatgctgaagaaggcatggaagccggacatcatcacgcgccgtgcttcgcgctcgacgatgacggcctgtacgttcatcgtgcagtccatcgcgcccacggcggcgccgaacacgaacaggaccagccctagtgtccaggccgaaccggccagcgccaggccgggcacggtcaggcagatcagcaggctgctggccaccatcacccgccggcaaccgaggcgcgcggccagcacgccggacaacggcattgccagcagcgaaccggcaccgaggcagagcagcaccagccccagcgtggcgtcgttgatcccggtgcgtgcctttgcgaacggcaccagggtggcccacagcgcggtggcgaagccgggaatgaagaacgcagcgcgggtcgcgtgctgttcggcgcgcgcgcggttggcaagggacatgagcggtacggtcaggggggagtggggtgtaccgcgatgcctgcggcgcggaagcgtgccgccaatgcgggcggtgcggtggtggtcagcaccaggtcgtcgatctcgtcgaggctggcaatctgccagttgccgcgtgcacccagcttttcagtcgtggcggcgacgatgacacggctgctgcaggccaccatcgcgcgcttcagcgtggcttcttccgcatccattgcccacacgccggtgtcgccgtccaccgcgcaggggccgggcaggtacacatcggcgcgcaggcgctgcacctgggccagtgcttcggcgccgaccgcgccgccaccgctggccaggcgcccgccgatcagctgcaccgaggtgccttcaagcaggctggcggccgtggcgatctgtggcgcgttggtgatcaccgtcaagccgagggcggccggcaactgctgggcgatcgccaggttggttgaaccagcgtcgagcagtacgacctggccgggttgcagcaacgcgcagacgcgggcggccagctcggccttgtcgccgcggtcgcgggtcagccgctcgcgcagcgggcgttccttgggcggtggcagtacggcgccaccgtagacgcgctggcacaggccctgcgcggccagctcgcgcaggtcgcggcggatcgaatcttcggacacggcatagcggcgcgccagctcggcggcaaccacgcggccctgctggcgcagttcctccagaatctgccgggtgcgctgggcggggagggggctgggatcggagctcatgctgcaagtctgcacgttcgtgcattaacgtgcaacaacgtgcatgctgcgtttgggcggggcacagggcggctggactgccggtgaatccgcccgcgcccacgtctatggatcgccctcgcggcccggcatgatggcggggcacctggcatggaatccctgatgtcccccaccgttcaccgcaagctgcgcatcggcgcggaccagtacaccggccagaaagtggtcgaccagcagttccatgagtgcgatttttccggtgccgacctgaccgccaccgagttcatcaactgcagcttctacgatgccgacagccgcagcggctgccgcttcaatggcgccacattgaaggaggccagcttccgcagctgcgacatcagcatgtgccacttcaacttcatcaaggcgctgggcctggagatcagcgagtgccgcgcgcagggtgcggatttcagcaacgccagcttcatgaaccagatcaccacgcgcagctggttctgcagcgccttcatcaagaagtcgaacctgcgctatgccaatttctcgcgggtcacgctggagaaatgcgaactgtgggagaaccgctgggacggtgcaaacgtcagcggcgccagctttgccggctcggacctgtccggtggccagttcgagggaatcgactggaacagcgccaacttcaccgactgcgacctgaccaattccgatctgggcgagctggacctgcgcagcaccaacctgcgtggcgccacgctggatgtccagcaggtggcgctgttgatgcagcggatcggcatcaccgtggtgccgtaggcattacccggcgtacgccacccagcccttgaagctgaagcctgcatagaacagctccacgccgtcgaagccggcctcctgcagcagcgtcacttcctgttcgggggccagcagcggcagccgctcggcaatggcgtcgatcgcgcgctgtgcatcggcgtgggcaacgccggaggcttcggcgaacgcggcgtagcgctgcaaccagcgcagcttgccggccggatcctgcggcacgctgtggtgggccaccaccagcggcgcgccgggctgcaggcgcctgtgcagctcccgcagcgtgtgcaggcgctgcgcgccgtcgaggaagtgcagggtcagcaggcagctggcaccatcgaagcgcacgtcgggggcatcgtcgatgtagccttccagcaactgcacgcgcgacatcagcgggcccagtgtctgttcggccagggccagcatcggtgcagccgggtccacgcccagcagctgccagcccggctgcgcctcggcaaatgccttcagctccagcccgccaccggcgcccagcaccagcacgcggccctgcgcaggaacgtgttcggccagcagcaggcgactcatctgctgcaacgcgaggaagcccggcacctggcgcagcgggccctcggcatagcgggcaacggcctgcggatcggagaacgaagacatgcgtgcattcctgcaacagggacataccactgtaccgtggcatgcaagtgcctttgccgggggtcgctcctgcctgcgctgaccggcttgcatccagctcaacgcaacgcccgcgccagcacctgccagatcctcgggtcctggcactgcgagacgttgaagcgcagatagtcggccgcgcgctgcgactggctgaacgcgttgcccggcgccagcacgatgccctcgcgcaggcattgccgcgccagtgcggcggcgtcgcggccgtcgggcagctggcaccacaggaacaggccggcttccggctgcagccacggcgtgatgcccagcgcctgcagtttccgcagtgtgtgccggcgtgcatcggccaggcgcgaacgtatcgactgcatgtggcggcggtaaccgctatcggtcagcgcgatgtgcatcaactgcgcggccagatggccgccgccaaagctggtcgccagcttcaggtcggtcaatgcttctatccagtcatggcgtgcagcgatgtagccgcagcgcgacgctgccgacagcgtcttggagaaactgccgacgtggatcacccgtgacagtccatcgagcgcggccagccgcggtgccggctgcagttcgaagtcggcgaagatgtcgtcctcgacgatgatcaactcgctgcgttcggccaggcccagcaggcggtgcgcggtgttggccgaaagcaccgcgccggtcgggttgtgcaggccggaattggtgatgtacagccgcggcgaatgcgcctgcagggcttgcgcgaacgcctccaggtccgggccgctgtgcgtgtacggcacgccgatggcctgcacctggtgcgccttgagcagcgcgtggtaattgaagtagctcgggtcatcgaccagcacgcagtcgccgggcttgagcaggaaacggcagagcagatcgaccgcgtgcgtaccggattcggtcagcaggatctgctccatcggtgcatcgatgccaagcgtggcgctgcgcctttgcagcagctggcgcaacgcgggcagcccgagcggaccggcgtagtccaccagttgcatggcatcggcacgcgacagccggcgcaggccgcggcgcacgccatcgtgatacagccagtcactgggcatccagccgcaccctggcttgagatcgcccgcgggcgtttccagcgattgccgtgacacccacagcggatccaccgcgcgatccagccgcggctccatttcggccagcgccagcggtgcggccgggccactgacgtagaagcccgagcctgcgcgcgcactgatcaggccttcggccgccaggcgctcgtaggcctcgaccacggtggagactgaaacccccatggtcgccgcctgcgcacgtaccgaaggcaggcgggagccggggccgtccacccgtgcactgatgcgggtgcggacggtctggatgaccgattcgatgcgggtgagcgggcgcggcatggtggaaccgtagtggaagtgtgggcagtacagttacttgcggctgtactggattgtagctggggtcgttccgcgccggatgcttccatacaggagcagccgggcatcgtccggcaccttcaggagtacaggcgtggaacggtcggcgagtggttggatcaatggcttcatcggtgtggtgatcttcgccggctcattgccggccacccgcctggcggtgctgcagctggatgccgggttcgtcaccgccgcacgcgccaccatcgccgcggtgctcggtctggggctgctgcttctgctgcgccagccatggccgcggcgcggcgacctgccggggctggtggtggtcagcctcggcgttgtggtcggcttcccgctgctgaccgcgctcgcgctgcgtcacgcgtcgtcggcgcacgccatcgtgttccttggcctgctgccgttgagtacagcggtgttcggcgtgctgcgcggtggcgatcggccgcgcccggcgttctggctgttctcgttgctgggcagtgcctgcgtggtcggctatgccgcgcgcaacggaatcgaagcctcgttgcaggccgacctgctgatgctggcggcgatcgtggtgtgcgggctgggctacgcggaaggtggtcggctcgcccgtcatctgggcggctggcaggtgatcagctgggcactgctgctggcgttgccggtgatgctgccgctgacggtgctgatgcgcccggcctcgttcaccgcggtcggtgcctcggcgtggtgggcactgggctacgtggcagtgttcagcatgctgatcggcttcctgttctggtaccgcgggctggcccagggcggcatcgctgccgtcggccagctgcagctgcggcagccgttcttcggcctggccctggccgcgctgctgctgcacgagtcggtcagcctcagcatggtgctggtgaccgtggtcgcggtgatctgcgtcgccggcgcgcgccgcttcagccgctaggaaaaaggggacggaggggattaagtcgtttcaggcacagcaggaccaattacgacttaatcccctccgtccccttttccggggtgctgcggaaaaggtgcgcaacggcgtagtcgatgaacacccgcaggcgtgcactgggatggcgcccgccgggccacagcagcgagaactgcccccggtgcgtgggcagtgtgggcagcacctgttgcaggcggccatcggccagcgcgtcagcggcgaggaagtcaggcatccaggccaggcccatgcatccgatcgcagcggccagcacggcttccatgttgttgcaggtcatcgccgtgggaaggcgcgccccggcgtcaccttcgatgccgggcagctgccacggatgcagctttccggtggtggggtaacggaagcgcagcgcggtatgcatgcgcaggtcgcccacatcgccgggcgttccatgcatctgcagatagcccggcgccgcacagaggatgaaacgaaaaccccccagccgccgtgcggtcaggctggaatcggccagttcgccactgcgtatcactgcatccaggccttcgctgaccacatcgacgatgcggtcgttgaagtccagttccagctgcacctgcggatagcgttgctggaagccgggcagcaccggcagcaggaagcggtagccgatggtgggcaggccgatgcgcagcagcccgctgggggcgtgctgtcgctgcgccaagtccgcctgtgcttcggaaagctcgtccagtgcacgccggcagcgctgcagcagcagttcgccttcgtcggtgagatgcacgcggcgggtggtgcgctggaacaggcgcgtgccgagttcctgttcaagccgggcgatgcgcttgccgacggccgaggctgacaggccgagtacgcgggcggcaccgacagtgctgccggcctccgcggtgcggacgaaggcgagcagggcggagatggagtccatgcttggatgattgcggaacatctcgccgcaatcaacgtccaccgagcctgtttttctggaatagcggcctgtccatcatcaatgcccctgatggatggaggcccgcatggccccggattcgatgctccctgtacctgtccgcgcgcagcagcgctgggcgctgcttgcggtctgcctggccgcgctggcgttgccgttgtccttctctgccggtgcagtcgcggtgccggcgctggcccgttccgcggcggcatcgcccaccgcgctggcctgggtgaccaacgccttcatgctcaccttcggcagtctgttgctcgctgcgggcggcttggccgatcgatatggccgtcggcggctgttcctgctgggcacggcgggcttcaccaccgccaccgccgccgtctgccttgctcgcacgctgctatggctggatctggcgcgcgggttgcagggcgttgccgcggcggcggcgctggcatccggcacggcgctgctggcacaggcctggcaggggccggcgcgtgcccgtgtcttcgccctgctgggcaccacgttcggcatggggctggcgttggggcccttgctcgcgggcctgctgctgcagacattgggatggcgcagcgtgttcgccgcgggcggtgtgctcacgttggtggccttcggcctgggggcacgcgcgttgcctgaaagtcatggcgagcgccgaccactggatatcggcggcatgctgagtttcagcctgacgctggcgacgttgaccctggcgctgctgtggctgggcgagttcggcctgcatgccgcgcgcgtgcggctggcgctgctggtgacgctgctgttgggcggggtgttcgtcttcatcgaacggcggcacccctcaccgttgctggacctctcactgttctcgcaaccggcgttcctcggtgtccagctgctgccggtggcgacctgcttcggctacgtggtgctgctggtcgcgttacctctgcaactgctgggcgtgcatggccagagcgcgacgctggtgggactgcagatgctggcgctgtccgcgccgatgctggtcctgccgatgctggccgcgcgttgggcggagcgcgtgggaagtgcgcggttgtgcacgctgggtctgctggtgtgtgccgccggcctgtacctgttgtcgcggcaggcgtcgcacccgtcgcccttgcagtgggtgccgctgctgatgctggtcggcgcaggcacggctttgccgtgggggctgatggatggactgtcggtgagcgtggtaccggtgcaacgtgccggcatggccgcaggcatattcggaaccgtgcgggtggccggcgaaggcatcgcgttggccgcagtcactgccttgcttgcgctgctgatcggccatcagctgcagggcgcgtcgccggcaccgctggtgcgtgccggtgcctatctggccacgggggcgcgggaacaggcgcaggcactgctaccgacgatgagccgcatgcagctgcagcacgccagtagtgaggcgctggcgacactgctgcgtgtactggcgctgctgaccgccgcctgtgccgccgtgttgcgcctgttgctgcggaaacgcacaggtgccttggtcggggacatggtgtagcaggctcatcgccgcctccgccgtcatcccgctgtcgtgtcccgctcacgccgcctatgcccacccgggcctagtgttgatcgtccccgtcccccacggagacccgccatgtggctgctcgaccatctctggcccagccgtcgaccccttcctcccccggtcgaggacgcgccacaggcaccgtcacgccggccctggctgaaacgcccggcgcgggccgggcgcagcggcatggcgccctggcagaaggtggccacgccaccgcggcgcacgcgccactagccggtgcggtctgatgggtggttgaccccgtcgctgaccgggatcaccccaagcgcgaacgggtcgatgccctccaggcaggccacgttgtagccgtactggtcggggttggagcggcgccggtgatgggtgtagatgccgcacaccccgcagaagtagtgctcggccacatgggtgttgaactggtacttctgcaggtgatgctgcccgcgcaccacctgcaggccctggcgggggacgctggcggcgatggcaccccggcgtcggcacatcgagcagtcgcagcggcgcgggtcgacgatgccgtccgggaggtccagcaacagctcgaccgtgccgcagtggcaggtggcgcggtgctggggttggaccggaacgccggccacggaagtgatgcccatcgttgctcctgtgaggtgaacctggccgcatggaccgccgcagacggtgcgccgcggtccctgaacgggccgtagatgccacggtgaacccgcttgtggctaactatgcggcttcgggaccgcgacaggatgccagtgagagccgcaggacgttggatgacaggaagtgccatggcgctggcagcgttgtgggtgaccgggctgctggcctatcagatgccggggccgggctggctggccaatggcattgcggtgctgtggctgctggttgcgctgtgggcgtcgtggcaggtcgcgcgtggccgtggccatcgtcgcctgggcatggcgttcggcgcgtcgctggcgctggccggcctgtggtggctgctgctcaccccgcgccaggaccgcgtctgggccgatgacgtggcccagcgcctgcacgtggtgtccttcgacgggcgccacgtggtgctcgacaacgtgcgtgatttcacctggcgcagcgagaccgactacgacgcgcactgggtgcgccgcgcgtacgacctggaccaactccgctcggccgatctggtgctgtcgtactggatgggcccggcgatcgcccacaccctgatctcgttcggtttcgaggatgggcgccacgtggtgttctcgctggagatccgcaaggaacgcggcgaatcgttctcggcgctgggcggcttcttccgcaaattcgagatgaccctggtggccgcggaggagaccgacatcatccgcacccgcaccaacgcgcgtggcgaggatgtctacctgtaccgcctgcacggcatggaccaggcgcaactgaagcaactgttcgccgcgtacatcgcgcaggcgcgcgaactggatgcgaagccgggcttctacaacacgctcaccagcaactgcaccaccatcgtcttcgatctggcccgccacatcgcgccgcgcctgccgctggactaccgcctgctgctgtccggctacctggccgaatacgcacaggaggtcggcgcgctcacgccgggcgtgccttatgccgaactgcatgacaagggccgcatcacccagcgtgcgctggacctgggcagcggcgaccacttctccaccgtgatccgccagggcgtgcccggcaccgagcaggacccgcagtaatgacccgactcttcctgatccgctggcagcgcgcgctgccggtgttgttcgccgccttcctgctgctgggcagcagcggctgcgcgatggtgactgtcaagcaggtgaagtccagcgattcgctggtgaacaagcgcgccgatgtgctcaacaccggcaagctcagcccggccgcgcgcgagacgctcagcgcggcgggcctggatgagtcgcagtgcgagaaggacttcctggtctgccgcagcacgttgttgatgaccgatgacctcaacgtcgagcagcggctgtcggcgttgtccgaactgtgggtgaaggccgcgctggcgctgacgccgaagaagaccgccgccggcgatccgccgatgagcgacgcggcgctggatgcctggctggaagccgcgcgttatgcctatgcctacctgttctacagcggccgctcgccgtccgaccgcgccttcgaagaccggcagacgcaggtgcgcgactactacaactacgccgccgagaaggcggcggtggtgctgttcgtgcgcgcgcgtgcagcggcactggccggcgaggactatacgaagccgatctcggtcggcagctggtcgctggcctccaactaccagcagttgaacctgaagagcattccggcgcagctggtgccggccggcacggtcagcttcgtcggcctgcgcagcacctatcgccgcgatggcttcggtgccgagctggtgatggtgatggacccgcccaagctggtcgcgccggtgatcgcgggcgatgggccgaaggcggaaacagcggcggatgatgctgacgacgagcgccgtggccgccgccatcggcatgacgattcggtgccggaattcagcgagatgtcctcgatcaatgtcaccgcgctgctgcgtttcgaaggcagcagcctggaagacgtgatgcgcacgcgccgggttgaactggacgcctattcgccggaggccactgaacgcatcaccctgcacggcgaacaggtgccgctggccggcaatttcaccgctgcctacggtctgtggctggcgcagagtggcttcgcccggcagtcactgcgcacactgttcggcatgagtgagggcatcggcgaaccgcacatctacctgatgcagccgtgggacccgaaccgccgcatcatcttcatgctgcacggcctggccagcagcccggaagcctgggtgaacctggccaacgagatcatgggcgaccccgagctgcgccagcagttccaggtgtggcaggtctactacccgaccaacgcgccgatcgcgctgaaccgctacgagatcgccaacgcgttcaatgacacgctcaagcacttcgaccccaacggcagcacacgcgcatcgaaggacatggtctatatcggtcacagcatgggcggcgtgctcgcgcggctgttggtgagcgactcgggtgatgtgctgtgggatgacctgctggccaactatgacctgaagggcgagcggctgaagcgggtgcaggccaagctggggccactgctgcatttcaaggcgcagccgaacgtggaacgcgcgatcttcatcgccgcgccgcaccagggcacggatatcgccggcaacaaggtcgggcggctgatcgggcgcctggtacgcctgccgctgaccattctcggcaagttcgaggacgtgttcatggcgctggcacaggccgagcagcaggtcgacggcaccgccaagccgaagattcccaacagcatcgacaacctcaaggccagcgatccgttcgtgaaggccgccgcacagctgccgatcgaagcgggcctgaagtaccactcgatcatcgcccagcgcaagccggagctgccggtggagaagtccgatgacgggctggtgccgtactggagcgcgcatctgccgggcgcgctgtcggagaaggtgatcatttccggccacagcgtgcaggagaccccgcaggccgtgctggaagtgcgccgcatcctgcatcgggatatcgatgatgtgggagccggtacacggtaatgccggcctctggccgtcgccatcatgggattcccgcgtgcgcggaggttgccggccagcggccggcactaccggaatccggcggcgctacacccgccgcgcgatcactgcggccagcaccgccagaccgaaggtgatggccaggcacagcaggtagccggtgtgcggcgcgctttccacgaacatggcgaacaacgcgccggacaccgccagcgcggtggtcaccgacaacgcctcgctcagctgcagcgccgaggtattggcaccctgctcatgcggtgctgacagcgacagggtcagcaccgacaggctggcgtagatcatgcccatgccgaagccggtgacggcccagccgaccagcgcgaccggcagcggcatcgggttgaacagcaccgacagcgttgcggcgatgccgaacgtcatcatcaccgtgccaacgcgcagcagctgctggcgtgaccagccacgctgctggtggccctgcagccatgaaccggcgaaccagcccagcgcaccgaggctgagcacggcgcctgcccagctgggcgagagcccgcgttcgcgctgcagcagcaggggcagataggcctcgcaggcgaagaacgccgctgcagcaatgccgcgcaacgcgatcacgctgggcaggccgcggcgcaggatcagggttccggccggcagcagccgatgcacgcagaacagcagcgccagcatcgccacgccgatgcagagcagggcggccatgccctgttgctggccgccgacgtagagcagtagtgcggccagtgaggcgccagaggcccagcgcaccacgttgctgcgttcgccatcgttgcagaccgcaacgggaggttgcatgcgcgccagtgccgggcgcagcagcagtgcggccggtatcgccagcagtggcactgccaggaatacccagcgccagcccaggtgctgcaccatcaggccactcaacgccgggccgaccatcgagggcaccacccagcctgcggagaacgccgcgaacaccttcggccgcaggtgttcggggtagctgcggccgaccatcacgtacagcgagaccgaaatcgcgcccgcgcccaggccctgcatcaggcgcccggccaccagcatgcccatgcgcgtcgcaaagccggccagcagcaggcccagcacgaagcagcccaggccgtaccagagtggccgcgcggggccgtggcgatcggcccagcgcccggccagggtcatgccgatcacactggtggccagggtgccgccaaaggccagcgcgtacaggcgcagtccatcgagtgcttcggccacggtgggcatcgcggccgcgacggccagtgcttcgaaggcgtgcagcgcgaccagtgcgaccatgccgatggtcgtggcgcggtagcgcgcggacaggatcgagctgtcagccggcaggtgggtgtcggcgggagagagggtcggggtcatacgggtcaggtgcaggccgcgcttgtcaacgggcggcgaagatagcagcatgccacctcaactgtagttgaggtcaagcaatggcatcccaggaactcagcgttggcgaggtctcccagcgcagtggcgtggccgtttccgcactgcatttctacgagcgcaaggggctgatcagcagcctgcgcacctcgggcaaccaacgtcgttacagccgggacgtgctgcgccggttggcggtgatccgcgtggcgcagcgggtgggcatgccgctggaagcagtcggccgtgccttcgaaagcctgcctgacggacgcgcaccgaccaaagcggattgggccaggctgtctgcgcgctggcgcaacgagctggaagagcgcatccacatgctgcagctgctgcgcgacgaactgaccggctgcatcggttgtggctgcctgtcgctgcagcattgccgcctggccaatcccggcgacgtcctcggcgaacgcggcgacggcccgatgcgctgggagtgagcgacaaaaaggggacggaggggattatgtcgtttgtgcacttgcgacttaatcccctccgtcccctttttcttaccagaccgtgatcgtctcgccgctctggatgccttccaccgcgcgctggaaggccagtgccgcgcgctgtgcgcttaccgcctcgaagcccgggaagtaggggccgtaggcggccatcgattcgatcagtacgttcgggctgaccacgttgatgcgcaggccgcgcggcagcagctccagtgcggctgcgcgcacgaagccttccagtgcggcattcaccgaggtggcgttgacgccgtcgcggatcggttgtgcgctgacgatgccgctggtcagggtgatcgagccgccgctgttgagatgatgctgcgcggccagtgccagcctcacctggcccagcagtttgtcctgcaggccgaggttgaactgcgccggcgtcatctgctgcagcgggccgaagtgcagcttgccggcggtggaaatcaccgcatcgaccgggccggtacgtgcgaacagttcggcgacgctggcgtcatcggtcaggtccacgcgcagttcgccgctgctgcggccggcggcgagaatctgatgctgttggccgagctggcgggcgactgcctggccgagggtgccgctggcaccaacgaggaggatcttcatggccgttccttgcgtaagggagtgagcgcagtctgcgccctcacaatggggttaggtaagcggcgtatgattcgcagattcctaactaaggattagtaatggatacccttcgatgcatgcaggccttcgttgccgtggccgagcgtggcagcttcgccggcgccgccgaacagctgcaggtctcggcggtgatggtgggcaagtacatccagcagctggaggcgcatctgggtaccgcgctgctgcaacggaacacccgccgccagcgcctgaccgaagccggcagcgcctatctggccggatgccggcaagtgctggagcaggtgcagcaggccgaggccgatgtggccggtctgcaggtacagccgcgtggcctgctgcgggtcagtgcgccgaccacctggggcagctgcgtgctggcgccgcagctggccggcctgctgcgcgcgcagccgcagttgaacatcgaactggatctgagcaaccgccgtgtggacctgatcgaggacggcttcgacgtggcgatccgggtcgggccgttgccatcgcaggaggtggtggcgcggccgctgccgccgtatgcgatgagcctgtgcgcggcgccgtcttacctgcgcaggcgcggcacgccacgcacgccggcggacctgcaggggcatgattgcctgagccatcttgcctggcgtggtggccatggctggcagttggccaacggtgaacaggtggattgggaggcgcggctgacctgcaacgacgggttcgcgctgcgcgaagccgccgtggccggggccgggttggtgttgcagcccaccgcgctgttggcgggggagatcgcagcagggcgcctgaagccgctgctgcgcgactacctgcccgaaccgcgaccgatgcatctgatctacctgccggatcgacggccgcgcccgcggctgcagtgcttcgtcgatttcgtcatggccacatttgggcaatgagcatccacgccatgcgtggatgatggtaggtgccgaccgttggtcggcacacatcgggatcaatcattcgccgcagacaattcctgcccgcgcacctgcgcagcacgcagcgcgttgtccaccagcacttcgaaaccaccggcctggaagctctcgatcgcggcctgggtggtgccgttcggcgaggtcacacggcggcgaagctcggccgggctttcgccggcttcatccagcatgcgcgaagcgcccagcagggtctgcaccaccagcgtgcgcgcggcgtcggccggcaggccctgggcaatgcccgccgcttccatcgcttcggccagcaggaacacgtaggccggcccgctgccggacacggcagtgaccgaatccatcagcgcctcgcgctcgatccacacggtacggccggcactggccaatacctgttcggcctgcgagcgctgctgtgcatccaccgacggcgtggcatacaggccggtcacgccggcgccgagcagggccggcgtgttgggcattgcacgcaccaccggcaggttgccgcccagccagcgttccagctgcgcgctggtgatgccggcggcgatcgacaccaccagtggccggcttgcctgggccagtgcctgcagcgactggcagacctcgcgcagcacctgtggcttcaccgccagcagccaggtgcggccctgtgcggcggcatcggcggcattgtcgtgcacctgcacgccgaaatcggtggccagcgactcgcgcagtgctgcaaccggttcggccacgtggatgtgtgcggcgggcacgccctggcggatcaggccggcgatcaggctgcgcgccatgttgccgcctccgatgaaggtgatggaatcagctgtcatgaaactctccttgcaagatcaggccgggcgaggacgcgcgccgaacagggcggtgccgatgcgcaccaaagtggcgccctcggcgatggcgtcggcgtagtcgctgctcatgcccatcgacagcgtgtcgacctgcgcgtgctgggcggccagcgactggaaaagtgtgcgcatgcgcacgaacgcatcccgacggcgttccgcctcgggccatggcgcgggaatcgccatcaggccacgcaggcgcagggtgggctcggcggcaatcgcagcggccagcacctcgacatcctccggcgcacagccgtgcttgctggattcatcgtcgatgttgacctggatcagcgcattcagcggaccacgcgctgccgggcgatggcgcgccagcgccgtcaccagcttgggccggtccacgctctgcacccaatcgaagtgggtggccacggcctcggccttgttcgactgcaggtggccgatcaggtgccactccagcgccaggtgctgcagcgcctgcatcttggccagcgcttcctgcacatagttctcgccgaaggcctgctggccctgcgcggccagcgcagccacggcctcggccggttgggtcttggaaacggccagcaggcgcggatcgggccggccggccgcctcggcggcggcatgcaggttgctcaggatctggggcaggggagtggccacgtaacgcgttccgttgaatcaggaggctatactgccgcccggggaaagatccttccagtcgaagccgttattggggagtagccgctcatggatatcgccgaactgctggcgttttccgtaaagaacaaagcgtccgacctgcacctgtccgcaggcctgccgccgatgatccgcgtggacggcgacgttcgccggatcaacatcccggccctggaccacaagcaggtccatgcgctggtgtacgacatcatgtccgacaagcagcgccgcgattacgaggaattcctcgaagtggacttctccttcgagatcccgtcgctggcgcgcttccgtgtgaacgcgttcaaccagaaccgtggcgccggtgcggtgttccgtaccattccgtccgaggtgctcaccctcgaggacctggcctgcccgccgctgttccgcgaggtgatccagcagccgcagggcctgatcctggtgaccggccccaccggttcgggcaagtcgaccacgctggcggcgatgatcgactacatcaacaagaacgaatacggccacatcctcaccgtcgaggatccgatcgaattcgtgcacacctcgcagaagtgcctgatcaaccagcgcgaagtgcaccgcgatacgcatggcttcaacgaagcgctgcgctcggcactgcgtgaggacccggacatcatcctggtgggcgaacttcgcgacctggaaaccatccgcctggcactgaccgccgcggaaaccggccacctggtgttcggaaccctgcacaccagctcggcggccaagaccatcgaccgcatcatcgacgtgttcccggccggcgaaaagccgatggtgcgttcgatgctgtccgagtcgctgcgtgcggtgatctcgcaggcgctgctgaagaaggttggcggcggtcgtaccgcagcgtgggaaatcatggtcggcactccggccatccgcaacctgatccgcgaagacaaggtggcgcagatgtattcggccatccagaccggccagcagtacggcatgatgaccctggaccagcatctgcaggacctggtcaagcgcagcctgatcacccgcaaccaggcccgcgagtacgccaaggacaagcgcctgttcgagtaaggcgggacaaccacgggcggcgtgcaccagtgcggcgccgtccccgtgccgtttcctccaccgaccgtttcctggtacatgccctcttgggagcccgccgtgaacagcaccgcgaccaccatcgatttcacttcgttcctcaagctgatggcgcaccagcgcgcctcggacctgttcatcacggccggcatgccgccggcgatgaaggtcaacggcaagatttcgccgatcacccagaccccgctcacgccgcagcagagccgcgacctggtcctcaacgtgatgaccccggcgcagcgcgaggaattcgagaagacgcacgaatgcaacttcgccatcggcctgtccggcgtcggccgcttccgcgtcagctgcttctaccagcgcaaccaggtcggcatggtgctgcgtcgcatcgagacgcgcattccgaccgtggaagaactgagcctgccgccgatcatcaagacgctggcgatgaccaagcgcggcatcatcctgttcgtcggcgccaccggtaccggtaaatcgacctcgctggcagcgatgatcggttaccgcaaccagaactcgaccggccacatcatcaccatcgaagacccgatcgagttcgtgcacaagcacgagggctgcatcatcacccagcgcgaggtcggcatcgataccgacagctgggaagccgcgctgaagaacaccctgcgccaggcgccggacgtgatcatgatcggcgaggtgcgtacccgcgaaggcatggatcacgccatcgcgttcgccgaaaccggccacctggtgctgtgcaccctgcatgcgaacaacgccaaccaggcgatggaccgcatcgtcaacttcttcccggaagaccgccgcaaccagctgctgatggacctgtcgctgaatctcaagggcgtggtcgcgcaacagctggtgccatcgcccgatggccgctcgcgcaaggtggcgatggagatcctgctgggcacgccgctggtgcaggactacatccgcgacggcgagatccacaagctgaaggaagtgatgaaggactcggtccagctgggcatgaagaccttcgaccagagcctgttcgagctgtaccaggccggcgagatcagctacgaggacgcgctgcgctacgccgattcgcagaacgaggtgcgcctgcgcatcaagctcagccagggcggcgacgcacgtaccctgtcgcaggggctggacggcgtggagatctccgagatccgttgacctggccggcatcggtcgtggctggattgatgaattccggtcatgaccgactgcggccgggctggctcaatccagcgccccgacaggcgtatcgtcatcactccccctctggagcacgacgatgcagacacgcgaactgggccgcagtggcctgaaggtttccgccctcggcctgggctgcatgggcctgacccatgcctacggtcagccggtggagcagggccagggcatcgccctgctgcaggccgccgtcgagcgcggcgtgaccttcttcgacaccgccgaggtgtatggtccgtacaccaacgaagacctgctcggccgggcgctggcgccctaccgcgacaggctggtgattgccaccaagttcggattcaagggcgcgcgcaccgatgacggcctggacagccgccccgagaatatccgtgccgttgccgaagccagcctcaagcgcctgcgcaccgaccatatcgacctgttctaccagcaccgcgtcgacccgaacgtgccgatcgaggatgtggctggcaccgtgcgcgacctgatcgccgaaggcaaggtcgggcacttcgggctgtccgaggcgagcgctgccaccgtgcgtcgcgcgcatgcggtgcagccggttgccgccgtgcagagtgagtactcgctgtggtggcgcgaaccggagcgcgaactgctgccgacgctgcaggaactgggcatcggcttcgtgccattcagcccgcttggccgcggcttcctcaccggtacgatcaacgccgacaccaccttcgacgccaacgacttccgcaataccgtgccgcgcttcgaagtggaggcgcgccgcgccaaccaggcgctggtggatcgcatcagtacgattgccgcagcacggggcgcgacgccggcgcaggtggcgctggcctggctgctggcacaggcgccgtggatcgtgccgatcccaggcaccaccaagatccatcgcctggaagaaaacctgggcgcggccgacctgcagctggcaccggaggagctgcaacgcatcgcacaggcgctggacgaagtgtcgatcgtcggcgagcgctacaacgcgcagcgcgccgcccaggccaagggctgatcaccagctgggtgcggaccgttggtgggtgcgcaccgttggtggtgggtgcggaccgttggtccgcacgccttgcccctcaccccagcggcccgcgcagcgcatcaagcaccgtgcgcatcgccacggtgacgtggcggcgcgacgggtagtacgcgtagtagccatcgaagtgcgggcaccagtcgtccagcaccgactgcaggcggccatcgtccagcatcggctgcacctggtcttccggcagccaggccagtccgctgccggccagcgcagcggcgcgggtcatgcccatggtgttgaacgtccattgcccgccaacgcgcacactcagttcgttgccatcctggccgaaatcccacggcatcagtcccccatgcgtaggcaggcgcagggtcacgcagttgtgcttggccaggtcgtccggatgctgcggcaccacgtgctggcggaagtagctgggtgcaccgaccacgcgcatgcgcagcggcgggctgatcggcaccgcgaccatgtcgcgcgccaggcgctcgccgaggcggatgccgatgtcgtagcgctcggcgacgatgtcggccaggccgtagtcggtggtcagttccaccttcaggtccggataacgctgcaacaacggcgccagccgcggccaagcgatgtactcggcggcatggccggtggcattgatgcggatggtgccggccgggcgttcgcggtactcggccagtgcggccagcccgtcctcgatctcggccaggcgtgggcccagggtgtcgagcaggcgggcaccggcttcggtggtcgatacgctgcgggtggtacgggtcagcaggcgcacgcccaggcgctgttccaggccgcgcatggcatggctgagcgcggactgggacacgcccagctgggcggcggcccgggtgaagctgccctcgcgggcaacgtggacgaaggcctgcaggtcgttgaggttttcgcggggcatgctggaatgatacggccgggctgcgcccggcacctgccgaagcaacgtcaacggccacgtcaacttcaaaaactggctatccgtgagatggcggggtgggcccggttgagggggacgccgtaaacccatccatgggggcttggtcgcggcatccatgccgctcacaccccctcaaccggacccaccccgccttcgacagttggctgcggcctgtcgggcgaggcggggtcggacgtttgggtgtgtcgatttctgcgtctgtggttcgtcgaatgaatgacttcaacgggagctgcacatgagcactgacaccaagccgaaaggcccggcctcgtatttcccctccatcgagaagacctacgggcagccggtggcgcactggttcgggttgctggccgggaagaagggcctgaaacacatggaactggtcagcttcctgaagagtgaacatggcttgggccatggccatgccaacgcactggtggctcaccatctggccggcaagggctgagcagcgccgagcccggggcagtgcgaggcgcattcagctgaacgatttcatctgcaactgtcatgcagatcgtgtctaataccgctccccacctgctgttcccccaccgcatgtcccttccttcccatggccccgcgccgtgcgacgacgctgacggccacctggtcaccgccggtccgctgaccccgccgcccgacagtgctggcaccaccgccgacgaaaaagcgctgcgtcactcgatcgccgaggacgtgcagggcatggtgctggccacgatggtggcctcgctgggcttggccatcttcgccaagggcgggctgatgatcggcggcatggcgggcatggccttcctgctgcactacgcgatgggctggaacttcggcctggtgttcgtgctggtcaacctgccgttctactgggtggcgctgcggcgcatgggctgggaattcaccctgaagaccttcgccgcagtcaccgcctgtggcgtgctgaccgacctgctgccgcgctggatcgacttctcgcacatcaacccgctgtattcggcgatcgtcggtggtgccttgtccggcctcggcatcctgttcttcatccgacaccgcgccagccttggcggcatcggcatcctggcggtgtacctgcagcgcacccgaggctggagcgccggcaaggtgcagatgtcctacgacgcctgcctgatggtagccgcgttcttcgtgctgtcgccatcgaaggtgctgtactcggccatcggcgcggtggtgctcagcctggtgctgatgttcaaccaccgccccggccgttacatgggcgtgtgaccgttcaacggggttgccggccagcggccggcactaccggcacccacgcgcggagatccctcagcgggcggcggcctgcaaccacggcggcgacagcgtcagcagccgcgcatgcaccgggcaatcctcggcgtgcgcgccgggcaggtagcccaggctcatcaggaactcgccggtgatctcgccaccggtgaagcggaaggtcttcttgaacagcttcacccagtcggccttgctgcgcggatgatgggcatccagccacgccgcgaagctgccatgactggcccgcagctgctggatcacctgcgcgttgtggatggcggccagtaccttcagccggttgcggatgatgcccgcgtccgatagcaggcgctcgatgtcctgctcggcataggccgccacgcggtcgacatcgaagccgtcataggccgcgcggaagccctcgcgctttttcaggatcgtctcccagctcagcccggcctggttgatttccagcaccagccgctcgaacagttcgccctcgtcacgctgcgggaagccgtactcgttggcgtggtagtagtcgtgcaccggatggcccggggcgatgaggcagtagccgctcatggggaagactcgctggattcgggttcgggatcgatggccactgcggggcgcccaccgatggacagcatcggccagcgtggtggttcgagagtgagtttgccatcacgcagcgcctggttgattgcctcggcctggccgctggcggtgccgaacagcgaaccggcccggcgccagtgggtgtccctgccacgtgcgtacagcacgcagtccggcccacggatggtgtacagctcgcacagcagcacttcgccggtaccatcgccgtcgaggtcgcgatgcacgatcaggcagtcgcgctcgctctgggcgcaggattcgccatcgatcgcgcgcgtggccagtgcctgccaccagtcgtccggtggcgagctggatcccttggccagcttcaacgcgcgctgcagggcgacgacgtcctgcggccccttgtcgaggcgctggccgtcatcccagcgcgaggtacgtgccagcgcggcagcgatcacctgtggcgcgttggcatcggcggtgatggctggatcacgctgcagttcgcgcagcgcccgcacaccgcggtggccaagatcgaagcgcagcacgttgacgtcactgctggtgatcgcgggcgggtccgcacgcaggcgcgccagctggctggacagggtcagccgcaccgggtccagcagcggcgagttgcccagcaatgccagtgccagcaccgcccagcacatccagcggttgaccggctccagcatctgcaaccagcggcgctgccggcgcagcaccgccagcgcgtagcccacggcatagccggccacggccactgcgacgagtaccgcccagaaccggtccacggtccagccgtactgcaccacgcgcagccccagtgcgtacagcgccagtgcggcgtagaccggcagcgccagcaggctggcttcaaccagacggcgcagcacgacggggtagggcgcggtgtcgtccccctgctggtagaccgcattggtgaacgtcaccagcaacagcgacagcaccagcagcaggctggcggccgagcgggtcttccacagcggttccagcccggtaagcggcaggctcagcacgaacaatacggcgatgaacgagagcagcggcagcagtccgcggcagatcgcgaacagcacctggcgggtgatctggatcgcgcggtgctgggtgcgcccgatcagcacgccgaacccggccaggctgccggtagccagcgcaatgaaggcatcctggcggaacaggtcgcggaagacggtgacctccagcagctggaacagcgccgcccacagccacagcagcagccaggtcagcccggtgaacagtgccgccagggcgagggtcaaaccgttctgccaggcgcgctcgaacagctcggggtagctggcgcgccaatgcccgtgctgcagctggaactgccaccagggcagggccacgaacaccgccacggcgatgcccagggtcagtggaaactgcagcgcgctcgactccagcgcggtctcgccagtgaggttccagccgatccaggcggccagcgccagcaccaccgccgagccgagcacggcctgcagccacaggcggcgctggcccaggtcgaccaggctcagcgccaccgcgctgggaatggccagcacccaggcgtaccagcagtagcgccagccgatatcgcggaacggccacgcatcggacagttcctgcgcggcatacagcatcagaccctgcagcagggcaatcaggacgatggcgctgcgtgccggcagggtcaggggcgatgaagactgcatcgatgaccttccatggcaaagcaccatcctagcccatcgcggttcgccgccattgcgcgaccatcccgcccccagcaggtagaatgggaccatgcctgtaacgccgacctccctcgccgatcacctcctcgtcgcgctgccgtcgctgctcgacgcgacctttgcccgcagcgtcgcgctgatctgccagcacgacgagaacggggcgatgggcgtgctggtcaaccagccttccgagtacacgctgggtgaagtgcttgcccagatggacatcaccaccggtgacggcgacctgcaggcgcgcatggtgctcaacggcggcccggtgcatcccgagcgcggcttcgtcatccatgacgacgcgcgggcgtgggattccagcctgatcgtgggtgacggcctgtacctgaccacttcgcgcgacatccttgaagcgatggcgcgtggcgaaggcccggccaatgccgtggtcaccctcggctgtgccggttggggcgcagggcagctggaaagcgagctgtccgagaacagctggctgaccgtgccggccgatgccgagctggtgttccagctgccgctggagcagcgctggcagggtgcggcctcgcgcatcggcgtggacctgttccggctgaccgactacagcggccatgtctgagccggccacgcccgtaccggctcctgctgtcccggcgatccgccgtgacggcaccgttctgggtttcgacgtcggctcgcggcggatcggcgtggccatcggcagtgccttcgctgcgcatgcgcgcgcggtggcggtggtcgatgtgcacggcaatggcccggactggaccgcgatcgaacgcctgctcaaggaatggaagcccgacggcctggtggtcggcgacccgctgaccctggacggccaggaccaacccaaccgcaagcgcgcgcagggcttcgcccgccagctgcgggaacgtttcaagctgccggtggtgatgatcgacgagcgttccagctcggtcgaggccgcccgccgcttcgccgtcgagcgcgccgaagggcgcaagcgccgccgtgatgcggccgccctcgatgccgtggccgcggcggtgatcatcgaccgctggctgtcgtcccccgacgacgccacccccattccctgactgcccgacaccgccatgaccgcccagcaaatcgatgcctccggacgcctgcgccacctgctgaccctggagggcctgccgcgcgggaccctgctgcagctgcttgaccgggcaggtcagatccgcgatgccgcagtcggccgcgtcggcaacaagcgccacgtgctggccggttcggcggtgtgcacgctgttcttcgagccgtccacgcgcacccgcagctcattccagctggccgcgcagcgcctgggcgccgatgtgctcaacttcgatgcctcgacctcgtccacccgcaagggcgaaaccgcctgcgatacgctgcgcaacctggaagcgatgggcgtgcgcggcttcgtggtgcgccacccggaggatggcgcggtagccgcactggcagaagcggcgggcgagggcaccgcactgatcaacgccggtgacggccgcagcgcgcacccgacccagggcctgctggacatgctgaccctgcgccaggccaagggcccggatttctcgaagatgaaagtggtgatcgtcggcgacgtgaagcactcgcgcgtggcccgcaccgacctgcatgcgctgcgcacgctgggcgtgggtgagatccgcgtgtgcggcccgcagtcgctgctgccggacgatgagaccctgaagggctgcgtggtcggcgatgatttcgacgcgatgctggaaggcgtcgacgcgctgatgatgctgcgcctgcagcgcgagcgcatggaagaaggcctggtgccgtcgctggagcagtaccacgcccagtacggcctgacccgcgagcgcctggcgcgcgccggcaaggatgccgcggtgctgcacccgggcccgatcaaccgcggcgtggaagtgaccgacgacgtggccgacggcccgcagtcgtgggtgctgcgccaggtcgccaacggcgtcgccgtgcgcatggccgtgctggaaacgctgctgggctgaccacccgctctggtaggtgtcaaccttggttgacacacttgccgcgcggcttgtccgcgcaccgctctggtagatgccaaccttggttggcactatccatccgcgcccaagttgtcgagcggatcacacgaagccccaagctcccattcgcaccatgcatggggatattgcccaagccgcgtcgccagtccggccctgatcggatttcccatcaggtacatcgcacgccggtgcaacgattcgtcagagcggatcgcatgatcgtgatagcaggcctgccagaagcgcccgactcgccccagcaaccggtttgcctgctgggctgtgcgcgacttgaaacgcttcatgacggtttccagcgttcccgcacgtagttcgaccagccagtggatgtggtcgggcatgaccacgtacgcaatcgagcgggtgaagccttcctgatccagtcgctggaattcgcggactgccaaggcggccgctgcggcgttggtgaagagcggcgcgcggtcatggacgacggcggtgaggatatagctgaggccgatgctggagcgacgaccgagcaggagacgtgtgttctgcatggagcaagcatggacgggcctgcttccagtgaacatcggggaatgggttggtttcaggtaggccagtgccaaccaaggttggcaactgccagagcagtcagtgccaaccaaggttggcaactactgaagctgcggctcagcgcttctgcgcgaacagccatgcccacatcgccgggtcggcataggtggcgtcccaggcgttgtggttgccgtccgggtactcggtgtagcgcacgtcgcgtgcagcggcgctccggaatgcggcgtgcagtctgcgatcgtcgtccggtggcactacatcatccagcgcaccgtggaagatccagatcggcgtgcctctcaggcgctgggcgatggccgcatacggatcggtttcctgggcgacctgctcgacgaacagggtcgggcgcaccgcgcgcggcgccagcaccgcgccgcacacgggcacgatcgcggcgaagcgcccggggtcatccagcgcgatgttccagctcccatagccgcccatcgacatcccggtcaggtactgccgtgagcgatcggcaccgaactcggcgatggtggcgtccagggcggccagcgcaacgcggttgttgcgcccgctccattcctggtggcccggcacctgggggaatacggccaatgcggggaagtcggccgcgtgcctgcgcaggtgcggccccagccccgcatgggtctgcttgacaccgtcgccgccacgctcgccggagccgtgcaggaacaggatgaccgggagtctggtgggagcggtggcctgaacgccggccggaatgaacacctggtagtaggcggtctcgccgtccaccttcactgcgcggccctcgaagcggccgcgcgcgctgtccggcagcgaagtgcaaccgctcatcatcagaaaggccagcagcggcagccagcgcgacatcgatcggaccatgggatttcccggggcggcagggtcagctgcatcctagcccgccgcaggtcaacgcggcatcgtgcggcgcgtcactctggtcgcgggaaactggcaatgatgtccagctgctcctgcgcttcggcattgccctcggcggcggcggcctgcacctgcgcgatgtccggatgcagcaccaccagcagcgggttctcgcagaccgggcaggcgtactcggtggcgtcctcgtccagctccatctccatggcacgcgagctgcccttccattcgcaggccgggcaggtgtgctgctggtcgcgccagccgggctggaaatagttttcgatcgtggtggccatgggtgtccagttggaaacgggtcagagccccgcgcagcggagatccgaccctgggttttggcgtgggtcggaactccgcgcggcggggatcggaccctgcagggttcagtgcagcagcaccagcgtggccaggccgaggaaggtgaagaagcccatcgagtcggtcacggcggtcaggaagatgccgctggccagcgccgggtcgaagccgaagcgtttcagggtcagtggcaccagcacgccggccagtgcggcgaacagcaggttgcaggtcagcgcgatggcgatcaccgccgacagcccgggcgagtggaaccaggccagcacgatcagccccagcacggaacccagcatcacgccgttcaacaaggcgacccgcacctccttccacagcagcgtgcgcgcgttggacgcgcctacctggcccagtgccaggccgcgcaccatcagcgccagcacctgggtaccggcattgccgcccaggcccgccacgatcggcatcagcacggccagcgccaccagcttgtcgatggtgccttcgaagtggccgaccacgctggaggccaggaaggcggtgcacaggttcaccgacagccacatcaagcgccggcgcatggcgcgccagaccgggctgaacaggtcttcgtcctcgtccaggccggcggcgcccagtgcctgatgctcggcctggccacggatgatgtcgaccacgtcatcgatggtgatgcggccgatcaggatgttgttgtcgtccaccaccggcgcggagatccagtcatggtcggagaactggcgggcgacctcctggtcgctctcgccgacgtcaatggccggctgctcgtcgtcgatcaggcggttgatcggggtggtgtcctcgtgggtcaccagtgccgccagcgacacccggccgaggtactgatggcgccggctgaccacgaacaggtgatcggtatggtccggcagttcgccgcgcaggcgcaggtagcgcagcaccacgtcgacattgacgtcggcgcgcacggtcaccacgtccgggttcatcaggcggccggcgctgtcctcgggataggacagcacctgctccaggcgctcgcggttctcgcggtccatcgacttgaggacctcgtcgatgaccgtatcgggcaggtcttcgaccaggtcggccaggtcgtcgatgtccaggtcttcgaccgcggcgatgatctcgtccgggtccatgtccgcgagcaggctctcgcgcacgtcttcgccgacgtggaccagcacctcgccgtcatcttccggatcaaccaggccccacaccacctcgcgcttgcccggcggcagcgattcaagcaggttgccgatctcggccggggccagggtgttgaccagccgacgtaccgggcccagccggccgctgtccagtgcatcggacaacatccgcagttggcgcgcagtcttgtcgtggcgtacagcttcagccatcgcagctcccgcgggataagaaaagccgcgatcccggcaaggatgcggcaacaggggtgttcagcgcgtcattatcgcaaggggatgtttcaacgcatagccgccgggtggcggtagtgccggccgctggccggcaacctcttggccttcaacgagacggggtcagatcccttttcccgcggaaaagggatctgaccccaggcgtgcatcccggcgagcgggtggtgtcagggcgtatcggccaccagcgccagccagcgttcgatggcgcggcggtcgcgcgcggccagcagcttcggggcacgggcgcgcagcgcacccagatcggcttcgcggatggcacggcgcacctccagcaacgtaccgggatgcaggctgaactcgctcaggcccagcgccagcagcaacggggtcatccgcgcatcaccggccatctcgccgcagaccgccaccggaatgcggtggcgtgcgccggtctcgatcaccatctgcaacagccgcagcaccgccgggtgcaacggtgaatacaactcgcccagcgcctcgttgttgcggtcggcggccagcaggtactgcaccaggtcgttggtgccgatcgacaggaaatcgaccagatcgatgaaactctccagcgccaatgccgccgccgggacttcgatcatcgcgcccagcggcacgtgctcggacaccatatggccttcgctgcgcagctgttcgctcagcttgagcatgcgccggcgcaccgccagcagttcctcgcgggtgctgaccatcggcaccagcacgcgcagcttgccgtaggccgaggcgcgcaggatcgcgcgcagctgggtgtcggccaccttgggccgtgccagcgacaggcgcacgccgcgcaggcccagtgccgggttctcttcgttgctcagggtcaggccggtacgatcggccttgtccgcacccaggtcgagcgtgcggatggttaccggccggccgctcatgcccagtgcggcatcacggtaggtctggaactgttcttcttcgtccggcagctcgttgcgctgcaggaacaggaattcggtgcggtacaggcccagcccctgcgcgcccagcgcatgcgcctgggtgacgtcctccagcgattcggcattggccaggagggcaatgtcgacctggtcgcgggtacggctgggcttgctgcgcaggcggccaagctcgcgctgctcgcgcgcgtgttccttcaggcgtgcgcggtagtcacgcaggttgtcggccagcgggttgacggtgatgctgccgtcggcaccgtcgatgatcagcacgtcgccgtcggcgacgcggctgagcagttgcggcacattgacgatcaggggcaggtgcaggctgcgcgccaggatcgcgctgtgcgacagcgcgctgccggcggcggtgacgatgccgaccaccccctgcgcctgcagctgcgccagttcggatggggcgatgttgtcgcagaccaggatctcgccggccaggcccttcatcaccggcgggcgttcgggttgcaggaaggcgtggatgcggccgatcacatggtcgagatcgtccatgcggctcttcaggtaggcatcgtccatgccatcgaagaccttggccaggcggtcacgctgcaggcgcagcgcgtagccggcactgtacgggccgctgcggatcagttcgtccaggccatacagcagctcggggtcgtccagcagcaacgcgtgcaggtcgaggaactcgcccacttcctggttcagtgcgccatgcaggcgctgacgcagttcgtgcatttccatacgcgcggcatccagcgcacggtgcaggcgggccagttcggcctcgacctggtgggcggccacgcgttgctcggccacttccagtgcatgcggcagccgcacgcgcgcccggcccatcgccgttccgcgcgccgcgccatggccggccaacagctgtaccggccgttggccggaagggagctggccggcgcgtgcgcgtggcacgctcagctgtcctcgtcgaagcggcgttcgaacaggcccaccaccgcctccatcgcggcggcttcatcttcgccgttgatgcgcacggtgaccggagtgccctggccggcggccagcagcatcacgcccatgatgctcttggcgttgatctcacggcccttggcggccatggtcacgttgcagcggaacggcgccagggtctgcaccagcttggcggtggcccgggcatgcaggcccaggcggttgctgacggtgagttctcgttcaagcatcgtcgactatcgctccattacgggtacccgccgcggctgtggcgggcagttgatccagtccctgttccggataattcatcacccgcagcaacatcggcaggctcagcgccgacacccggcgaaccggggtccccagccgggccagctgccctgcaaggttggcggggctggcgccgtacaggtcggtcaggatcagcacgccctcaccactgtcgacccgccgcagggcggccgaggcgagcgggagcagggcgtccatgtctgcgtcgaacggtacttcgaaagcttcggttttcagcggcaattgccgcaggagccgggtcgccacgtcaagcagggcggtcccgaccccaggatgtgttacgaggagaatgccacaggtcattactgcacgttaacaggtcaaggtgaatcggcgatagcagcagatgaggggcactgtgtcccgtattcagcgttatcggggtcagagcccttttcccctggaaaagggatccgaccccatgcgtttttcgatgcctggcagcgattcatccacgcatggtgtggatccatcgtgtcgaccaaggtcgacacctacccacaccgccccgccatcccacggaatgccgcttttgctgttgctgttgctgttgctgttgctgttgctgttgccggccagcggccggcactaccgacgggtgccgggcgcagcccggccggcccccctcaatcctgttcgcggtggtacgtcgccacgtcctgccagcccatctcgcgggcatgccgggccatgcgctcggccaggaacaccgagcggtgcttgccgccggtgcagccgaacgccacggtcacgtagctgcgggtgccatcacccagtttcggcagccaggtatcgaggaaatccatcagctgggccaggtagcgctgcacgtccggttgcgcttccaggtagtcgcgcacacccggttcgcggccgctgagcgcacgcaggtccgggtcccagtgtggattgggcagcacccgcgcatcgaacacgaagtccgcctcggcgggtacaccgcgcttgtaggcgaatgattcgaacagcagcgacaggccggtggcatggtccatcgcgaactcggtgatgatccgccgccgcagttggtgcacgttgaggttgctggtatcgatcaccgcatcggcctcgcggcgcaatggcgcggtcagctcgcgctcgcgggcgatcgcctcgggcaatgacaggcccagctggctcagcggatggcggcggcgggtgtcggcatagcgcttgagcaccgtttcgtcgctggcctcgaagaacagcaccttcacttccacgccggcgtcggtggccagctgccgccagtcgcccagctggctcaggtcggcctggccgcgcacgtcgatgcccaccgccagccggcgcggcgcgctgccgtcgtggttggccagcaggctgcgcacgaagtccggcagcaggtggatcggcaggttgtccgagcagtagtagtcctgatcctcgaaggtcttcagggcgacggatttacccgagccggacaggccgctgacgatgatcagggtcggggcggagggggtggcggtgctcatggacaggctcttcgaggggcaggggaatcagggtgttcgccgttccagcagattgctgtggcgggcgatgaacatcgctgccggatcaatgcccttggtgcgcaggatgtgcaggcgggtggcggcttcggtcagcacggccaggttgcggccgggcatcaccggcagggtgatcagcggaacgtcgaggtccagcacatggcgggtgcccgagtcgccggtcaggcgctcgtagccatgcggggtgggttcggtcatcggcttggtcaggtggacgatcagccgaaggtacttgttcttctttacagccgtgtcgccgaacatctcgcgcacattcagcacgcccaggccgcgcacttccagcaggtcctgcagcagttcggggcaggtgccgtcgagcacgtccggggcgatctgggtgaattcgggcgcatcgtcggctaccaggcgatggccgcggcttagcagctccagcgccagctcgctcttgcccgacccggcctcaccggtgatcagcacgccgatggaatagatctccatgaacacgccatgcaggatcacccgcggcgccagcgtgcgcgccaggtggtaggacaggtggttgagcagttcgtggccgcgcttgggcgacagccacagcggtgtaccggattcatcggcggccgcgcgcaggtcttccgggcacgcctggttgcgggtcaacaccagcgccagcggatgcgactgcatgatcttctcgatggtctcccaacgctggcggggttccagcgcgtccagccaggacagttcctcggtgcccaggatctgcaccttgttgggatagatcgcattgaggtagccggccagcgacggacgccgcgagaccgtgttgccggcctccagctcgcgtttctcaccggatttgccagcggcccagcgcagccccagccgctcgcgctgctgttcgaacagttcacgggcggtgatgctggtattcatgcggcactcgcaggtggggtcatgtccagcgcctcgcgcagcgcccgggcatcgccggcttcgcgcagggcctggcggatgtccggtgcggaaaacagctcggccagctcggacagcagcatcaggtgctggtgggtgtagtgggcggggacggccatcgcgaacaccaggtccaccggttcgtcgccgccgaaatcgaccggggtcgccagtcgcagcagggcgccacgggggcggtccagggtcggcgcgcggccgtggggaatggcgatgccgtggccgatcgcggtgctgcccagggcttcgcgctggcacaggttcagatagatctgtccggcgttggcctggcggcaggccagcaacccggcggcggcctgcaggacgctgtcacggtcggtggccgtgcagagctgggtctgcacggccgccaggaggtcagtcaggggcatgtctgcggggaacggtggcgatcagccaccattgtcgcccaccggcagcggtgcgtgctgctgttttttctccttgtgcttgatgaccaggcggtcaagcttgtccgcgagcaggtcgatcgcggcatacatggtctggccgccggcctcggcgtgcagggtctgccccggaatgttgaggctggcgtcgacgtggtgttcggtcttctgcagcttgagggtcacccgcgcttcgcagtgctggtcgaagtgttttccgatccgggccagcttctcctctacataggactgcagggccggggtgacttcgacgtctttgccaaacgtttcgatgcgcatcgggtttctcctgtgttcggatgtgccaatgaacctctccgccgggcgcggcggcgcgtcaagcgattctgaccctttcgtgcgaggcggaaatgttcatggcttcacgatacttcgccacggtgcgtcgcgctactggaattcccgacgatttgagcaggtcagccagcttggcgtcagaaagcggcttgcgcgggttctcgtcgtcgatcaggcggcggatcatcgcctggatggccgtgctggacgcctcgccaccgccttcggtatcgatgcccgaggcgaagaaggcgcgcagcggcagggtgccgcgcggcgtgcgcacgtgcttgcgggcgatcgcgcgcgacaccgtggattcgtgcaggcccagctcggcggcgatctcgcgcagggtcagcgggcgcagcgcctgctcgccgaattcgaggaagccggcctgttgcaggatcaggctgcgcaccacccgcagcagggtttcgccgcgctgctgcaggcccttcagcagccagcgcgcctcctgcagctggccgcgcaggtagccggcgtcggcctcgccacagcggcggatcagctgttcgtagccacggtggatcaccaccttcggcccggcatgggccgccagcgctgcgcgccagatgccgttctgccgccacaccaccacgtcgggcaccacataggtgtcctgcgacagcggcgcgatctgcgtgcccggacgcgggtccagcgagcgcagcagcgcgaccgccgtctcgacctcgtccagcggctgtttcagttcatgcgccagcccggagacgccactgcgcggcagccgttccagcgggcctgcggcaatctgtcgcgccagcgccagccccggcgtgtcggcaggcaacacgtccagctgcagctgcaggcactcgccgagcgtgcgcgcggcaacgccgaccgggtcgaaacgctggatgcgatgcagcaccgcgaggatttcatcctcaccggcatggaccgccggcagcagggtttcggcgatggtggccagcggttcgcgcaggtaaccatcgtcgtccagcgcatcgatcagtgcagcgccgatgctgcggtcatgcgtggaaagatgcgacaggtgcagctgccacagcaggtggtcggccagcgtttcggtttccgccacgcgctcggcggcactgccggtgtcatcgtcatcgtcgaagctgccaccactgccggcggcactccagtcgagttcggccggcgcccagtcgtcgccgttgtcggtgcgttcggcgggcgcgtcggcatcggtgctgtcgctggcctcattggcggcactgctgtcgttgctgtcggcccagtccagcagcggattgctctccacggcctgggcgatttcaagctccagctcggtcgtggacatctgcagcagcttgatcgcctgctgcagctggggcgtgagcaccagctgttgtcccaacgatgtctgcagccgagtcttcatgcctgtgccgaacggaaggaaagggacccggcgcctgcggtcacagcttgaaggaatccccaaggtagacgcgacgtacgtcggcgttgtccaggatcgcctccggcgagccctgggccagcacggtgccctcggcgaggatatacgcgcggtcgcagattcccaaggtctcgcgcacgttgtggtcggtgatcagcacgccgatgccacgctgcttgagatgggtgacgatgcgctggatttcacccaccgagatcgggtcgacaccggcaaacggttcgtcgagcaggatcaggcgcggctgcgcggccagtgcgcgggcgatctcgcagcgacgacgttcgccaccggacaggctggcgccgagctggtcggccacatggcccagctgcagctcgtcgagcaggctgttcaattcgcgttcgcggccggccgaatccaggtcttcgcgaagctccagtaccaggcggaggttgtcggccaccgtcagcttgcggaacaccgacggctcctgcggcaggtagcccacgccctgcttggcacgggtgtacatcggatcgctggtgatgtccttgccgtcgagcacgatgctgccggcatcggcggcgaccaggccgacgatcatgtagaagcaggtggtcttgccggcaccgttggggccgagcaggcccaccacttcaccggcgtcgagggtcagcccgaagtccttgacgacttcgcgctgcttgtagcgcttgcgcaggcccttggcgacgagcattacttcttgctcccggccggcttggccggcgtgctggccggcgccgccgccttgggcgtggccgccggctgtgccgccgcgttcttgttcttcggcggaatgacggtgcgcacgcggctgccatcgccaccggaattcatttcgccgctacgggtgttgtagaccatgcgctggccggcattggtgccgcgcgcgctggtgaccttgtagttgccggtcagggtgatgatctcggtcttgatgtcgtagtcgatgcgatcagccaccgcgtccatccaggtgccatcgtcgagctgctgcttcatcgtggcctgcttgccggtgaacaccgcacgcacggcctcgccgtccttcaggtagatctcggcttcggacgagcggatgtccagcgagccctgggtgacggtcacgccctgcgagagcacggtcttgccatcgccggtgagcacgcccgactgcgcgccggagtcgatgttcatgttctcgttgcggtcggtggacttggcaaaggcagcgctgggaacaaggagaccgagcgcgagtacggctgcaaagggaatcttcatcggggtccgttctaccggtggggccgcccgggaaaccgggggcggatgggtgggctgcctgccttgcgcctgtccggggacgtcgcaggagggcggcggaatcagcgtcggggcgtgtaacggcccttggactggctgaggaaatgatacgtgttgttcttcgaatccacctcgaagccaacgccggactgttccatgccggggcgggtcatggtgaccagcgcatcggtgcgggcacggttctccttcgggaacacgtccaggtggtcggtgcggaaggtggtcggcaccacgcccggatcggccgggctgtcgccggcgacattgccgcgcagcttcatctggtcgcccttggcgctgagccagcccgtctcggcacgcagggtccagtgcttgccatccttgtccggcatctcgaacagcggcgtggcgatgttgatggtctggtcgccacgctggcgctccagcaacggtgcgcgcagggtggtcgattccttgccgtgctcatccagggcgacgacctggaagtcgtgcaggacgtagtccacgccgacatcctggccggcagtggccggacccttgtcgcggttgcgcagggccgcccagctgctgagcagggccgccagcagcaggccgatgccgagcagggtgcgccagttcaggctcggcaggttcatgcgccgaacctcgccaggaccgcgtccacatgtccctgcgcggccagcaggatgtcacacagctcacgggctgcaccacgtccgccatcggcgcgggtctgccaatgcacgcgctcggcgatccacgggtgggcgttggccggcgccaccgccaggccgaccgcgcccagcggtgccaggtcaggcaggtcgtcgcccatgaaggccacctgctccaggccgatgccgtgctgcgcacacagcgcctgcacgctggccagcttgtcgcccacggcgatctgggtatcgatgccgaggtcggcgccgcgcctgagcgcggactggctgttgcgcgcggtgatcagcacggggtggatgccgtgctgctgcagcagtttcaggcccaggccatcctgcacgaagtacgccttgctctcgttgccgtccttgtcgtagtacagccgaccgtcggtgagggtgccgtccacgtcgaagcaggccaggcggacgcgggccgcggcggcatgcaggtgggcggggaaggcgggcaggggggaccagggcatcagggtggcaggctcggtggattcgggttgggacggtacagactgaatggggtctacggactgtcggttaaaccacccgggcccgcaacaggtcatgaatgttcagggcaccgaccgcccggccctggtcgtcgaccacgatcaggcccgtgatcttgtgggtctccatcagccgggcagcctccaccgccagctggtcggcgccgatggtacgtgggttgcgggtcatcacatcggcgatcttcgcggtgcgcacgtccagcgcgctgtccagcgcccggcgcaggtcaccgtcggtgaacaggccgatcagcacaccgtcggcatcgaccacggcggtcatgcccagccgcttgcggctcatttcgaccagcgcctcgctgaggctggcgtcggcccccacgctgggcaggtcctccccggtgtgcatgacgtcggtgatatgcagcagcaggcggcggccgaggctgccggccgggtgcgagcgggcgaaatcgtcggcggtgaagccgcgtgcgtcgagcagggccacggccagcgcatcgcccatcgccagcgaggcggtggtgctggaggtcggcgccagcgccagcgggcaggcctcggccggcacgctgacgtccaggtggatatcggcggcggtggccaggctggactgcgggcggccggtcatggaaatcagcacgttgccctggcgcttgagcaccggcagcagcatcagcacttcgtccgattcgcccgaataggacagggccagcaccacgtcggcctcggtgatcatgcccaggtcaccatggccggcttcgcccggatgcacgtagaacgcgggagtgccggtggaggccagcgtagcggcgatcttgcgggcgatgtgcccggacttgcccatgccggtggcgaccacccggccgcggctggccaggatcgcctggcaagcctgctggaaggcctcgccgaggcggtcggccacggcatccagcgcctgccgctcgatctcgaagacgcggcggccgctggcgaccaggccggcagggtcgacggaacgggggggcaacagggattcggccatgcggacgccacgcagcggaagtagaatggaggcacattttattaggaaagcccgttggacgccgacaccatccgcaacctgatcgaaaccggcctgcccggcgcccgcgccgacgtgcagggcgacgatggcgtgcatttcgaagcgaccgtggtctgcgaggcctttgccggcaagatgccgctggcccgccaccggatggtctatgccaccctgggcgacctgatgggcggcgcgatccacgcgctggcgctgaaaaccgtgaccccggccgaagccggctgaaccgcagaagatcccgaatacatggccaagatcgttgtgaccggcggcgctgcgctgcacggtgaagtgagcatctccggcgccaagaacgccgtcctccccattctctgcgcgaccctgctggccgatgcgccggtggagatcaccaacgtgccgcacctgcacgatgtggtcaccacggtgaagctgctgggtgaactgggtgccaaggtcaccatcgaccagggcacgctgtcgcgcggcagtgcgatcgtggtcgacccgcgtccggtcaaccagcatgtcgccccgtacgagctggtcaagaccatgcgcgcctcgatcctggtgctgggcccgctgctggcccgcttcggcgcggcggaagtgtcgctgcccggcggctgcgcgatcggctcgcgtccggtcgaccagcacatcaagggcctgcaggcgctgggcgccgagatcgtggtcgagaacggcttcatcaaggccacggccaagcgcctgaagggcggccatttcaccttcgacatggtcagcgttaccggcaccgagaacgtgctgatgggcgcggtgctggccgaaggcaccaccatcctcgacaactgtgcgatggaaccggaagtgaccgatctggcgcattgcctgatcgcgctgggcgcgaagatcgaaggcctgggcactgcccgcctggtcatcgaaggcgtcgagcgcctgtccggcggccgccatgaagtgctgcccgaccgcatcgagaccggcaccttcctggtggctgcggcgatgaccggcggcaaggtcacggtcaaccgtgcgcgcccgaacaccatggacgcggtgctgtccaagctggtcgaagccggtgcgaagatcgagaccaccgacgacaccatcaccctggacatgcagggcaagcggccgaaggcggtcaacctgaccaccgcgccgtacccggcgttcccgaccgacatgcaggcgcagttcatggcgctcaactgcgtggccgacggcgtcggcgtgatcaacgaaacgatcttcgaaaaccgtttcatgcacgtcaacgagttgctgcgcctgggcgcggacatccaggtcgaaggccacaccgccatcgtgcggggcagcgagcacctgagtggcgcaccggtgatggccaccgacctgcgtgcctcggcctcgctgatcctggccggcctgatggccagcggcgagaccaccatcgaccgcatctaccaccttgaccgtggctacgagaacatcgaagagaagctgtcttcgctcggtgccaccatccggcgcgtgccatgatcctgcgcggcaagttcagcccgcgtcgcaaggcgctgctggcgctggtgctgatcgtgctggcgtggctgggctacgcctggtacgccaacatcgccatcacccagggcatcgagcagaaggacatggactggaatggcgatggcacggtctcgcgcgacgagatcatcgagtcgttctatgcggttgcggtgaatgacagccaggacggcaaccgccattgccgcgccttcgtctggcgcagcaccggcgagcagatccgcgtggactgccgtaccgagttcaagccggcggcggccgaagaaaagaagtaagaaaaacgcccgcgaaagcgggcgttttcttttcgcggggcccggggtcggacccctttccatcggaaagggctccgaccccagccacacaaccggggtcagagcccatccccgaggggatgggatccgaccccggcactcagttcatcgccttgatggtcaggtccagggcatcgcggtcgttctcccgctgcagcatgcgcgccggcaccgggaactccggcacgatccaggcgatcagctccttgttgccgtcggcacgcgagaccttggtcgcttcgtagctcttgccgcccacggtgatcgactccttgccgatcacgcggtaggtcatgttcttgatgcggccttcgtcgaccatgcgataggtcagcggcttgccggcggcgaggtcacgggcgatcgccaggttgatcagcagcgcgtccatgtcaccggatttcagtgcgataggtccagcgcggtccggcttgatgtcgccggtccaggtggcctggttgctggtccagttgtagttggcctgcacgttgcgcttcttcaccagcagcgccgaacggtcctggctgctgagcgggcgcagctggccgcgcacttcttcgaacacggtgctctggctcaggtcggccagctggttcttcacctgcagcgtgtagcgccacttgttggcaccctcgctgctcagcgtcatgctgccattggcctgcatgcccatgtagctggccaggtaatcggccttgaacggctgcagggccatggccggcaggctggccaccgacagcgcggctgcagcgatccaggtgagggggcgggtcagggtgctcatgctcagactccttggtattcgatcaggcgcagatcgacgcggtcttcgccgtcttcgcgttgcaggatgcgcaccggggtggggacaccgttggcgatccagaggatggtttcgttgttgccgccgttggtccggtagacccgcagcgcgttgtaggacaggtcgccgacctcgacgttctcggtctgcggcgcggcctggtagtcgtgctggcggaccttgcccatgtccacgtagcggtagtgcatggtggcacccggacgggcatcccgcatgatcgccaggttgatcagcagggcgctctggtcgcccggctgcagcggaatcggctgcgcacgcttcttctcgacgtcgccggtccactgcgcggtaccggcctgccagttgtacgtgccgaccgccttcttgcccaggaacaggcccttgcgcaccgtgctctggctcagcggtgcataggcgccggcgcgctcctcgaacaccgtgctctgctcgatgttcaggcccagcacgctggcaaagccgcggcggccgaccacctgcatgtcgacccgccactggttgccgccggtatgggtgacctgcatgctggcgtcgccggcctccttgcctttgtagaaggcctggtaggtggcgctgaacggctgcagcggcggcggttcccacgccaaggccggcagggccggggccgccgcttcggccggcggttgcaccgctggcaccggcgccggagccggcgaggcggcaggcgcctgcgcctggcccaacccacgccgggaagcacgacaagcgacagcagcagtgaagtggacagcagggtcgtggtcttcatggaagagaggagccgcaggaggtgggcaggatgccagccccgcagtcagcggggcgtgtgcgtgggcgttaccggttcaggttcccggcggaatctagggccagcgggctaaacagggggtgaccgtccagttgcggctggccctcccgttcagtcaggcggccggcgcacagcagctgcagcgtggcgatcagcaggggatgctccaccgccagcacacgcgcggccagcgtgtcggcgtcatcgccgggcagcaccggtacccgcacctgggccagcacggcgccggcgtccagctcgggtaccaccaggtgcacgctggcaccgtgctcggcatcgcctgcatccagtgcccgcgcatgcgtgtccagccccttgtgcagcggcagcagtgacgggtggatgttgaccaggcggccattgaagcgctgcacgaaggcggcgccgagtatgcgcatgtagccggcgcagacgatccagtccggtgcgaccgcggccagtgcgtcgcccagtgcctgctcgtaggcggcgcggtcctggaattccttcggcgcatgcgcccagcgcaggttggcgctgacccgctgcagcgcggcggcggccgggcggtcggaaaatacgccgacgacctcggcgcgcaggcgtcccgcagcgatggcatcgaggatggcctgcaggttgctgccgcggccggaggcaagcacggcaatgcgggtgggcgcggtcattgcggggtactccggcggatcagcggccaggtcagcaggctgcccacggtggccatcagcatgtcggcatgggcgtcccacatgtcgccctgctgcccgttgtaggcctcggcggcgtccggcgacagggcgagcgcgatggcccattcgaaccactcgtagaccaggctggcgcacatcaccgtcatcaccgccagggcgaaggcctggccgcggcgcagcgccggccaggcgtgacgtgccagctgcagcagtgccggcgtgaaacagacgccgaacaggaagtggatgaggcggtcgaaatgattgcgctgccagccgaacgccgcattcggcgaccagccgatcagcgcctgcgtccacgcgtcgtagggaacgttcgagtacagccagcgggcggccacacagtgcagcgcgatgaagccgcagatcgcgatgaaggcaccgttgcccagccagccaccccggcggtcgacccacagcagggcgcccaggccgatcacggtcagcgtgctgtgcagcgcctgctcggtgggccacagcggctggatccagctgaccgcgaataccgccagcacggcagcgaaggccagcttcttggggcgcgagaaacggaaggcgctgggtgaagcggtcgtggggagggcaggcgcggacatgggaagtcgatcaggaaagggcggggcgtctgccggcaagttcagacgcggagatggtcgccgcggtcgaacagggcggccatgtcaggcttggacaggaacacccaggcataggcggtcagggccatgcccagcgggccggccagcaccgccagccaggccgcgcgctggcaccaggccagcccggtgcggcgcgacagcaggcgcgcggtgtgcagctgcacgaagcccagcgcggcagccagcgctgaaacgacgccgtacacggtggccagtaccgcgccatcgtccagcccgcgcgagctggcaaccaggccgatgaaaccgaggaaggccagcgcggccatccagtggaaaaccgccagcgcgtagaacagcaccttcagcgtctgcaggtggctgcccagctgaaggtgcgccagggtctgctgcggcagcggcggcggtgcgcccgggctcgtcatgccgccgtgcccgctgtgtcgaacgcggccttgacctgcggacgcagcagcgtgatcaggctgagtactcccagcacggtaccgatcggcgtgaacagacaggccagcccggccacgatcaggcacagcaggtagcggcggcggcgggccaggcaacggccggcgtaggccacgaacgcgcccagggtgacgccaccgaacacgatgacacagccgatcacgacgaacatccagccgaacacgcgctgttcggccggcgacgagggctggccgccggagttcatcggcaggttgccggtgagcgcggtgacgccgagcacgatgtggacgatgaagatcagcgagaacagcgcgatcaggccgccgaccacgtagtgcgcgattgacagcatgcgcaggtggtcggcgtcctgggggctgaacgccggtaccgccgtcgttggcggcggcacgggggtagggggcagcgggggcattgcgtccatgcgggctcctcggggccgggttcagccgatgtggacgcgctcggcgccttcagcagtgaccacctggccgatggtccagtggtccaggccctgcgccttgaccgcctcggacacggcggcgacctggtcggctgccacgatcagcacgaagccgatgccgcagttgaaggtgcgccacatctcgctgtcggccacggcgccttccttctgcagccactggaacaccggcggcagggtccaggacgatgcctggatgtccaggccgaggccgtcgggcaccacgcggatgatgttctcggtcaggccgccaccggtgatgtgggccatgccgtggatggcctcgccgtgcgacttcagcagtgccaggatcggcttcacgtacaggcgggtcggtgccatcagcgcgtcgaccagcttcacgccgccctccagctccaggtcggccgggcggccggcgcggtcgtagatgcggcgcaccagcgagtagccgttggagtgcgggccggacgaggcgatgccgatcagcacgtcgccggcggccacgctggcgccgtccttcagctcgctcttctcgaccgcggcgaccgtgaagccggccaggtcgtactcgcccggggcatacatgtcgggcatctcagcggtttcgccgccgatcagcgcgcagccggcctcggtgcagccgttggcgatgccgcccacgaccgctgcggcggtgtcgatgtccagcttgccggtggcgaagtagtccaggaagaaaagcggctcggcaccctgcaccagcacgtcgttcacgcacatggcgaccaggtcgatgccgatcgtatcgtggcggttcagctggtgggccagcttcagcttggtgcccacaccatcggtacccgacaccagcaccggctcgcggtacttgttggacaggtcgaacagggcgccgaagccgcccaggccgcccatcacttccgggcggaagctgcgcttgaccaggggcttgatccgctcgaccagcgcgttgccggcgtcgatgtcgacacccgcgtcacggtaggtgaggggggaaggggcggaagacggggtgttggtcacgggcgtcggcgctggcaggggttgaatgagcgattttaacaggccgcattggcgcaaaggccgtattcgggcaacaattcccccggattcgtcgagccaatggatgtcctgatgcgccgcagcctgattctgaccctgctccttgcactgagcctgccggtggccacgatggcccagagcggcctgcgcaccgagggagatgtcgccaccgcttcgggggcctacgaggccgaagtgcccgtcaacagccaggccgaggccgatcgcaacggtgccctggcccgtgccctgagcgtggtgctgggcaagctgtccggcgaccgcaacgtgatgtcacgccccggcgtggtgcaggcgctgcgcaatgccaaggactacgtggccagctacgactacaagcaggaccagagcgtgggtgccagcggcgcaccgagcttccggaccctgctggtggcccgcttccgcgaggatgacgtcgattcgctggtctcggcgctgggcctgccgctgtggccgcagccgcgaccgaagccggtgctgtggctggccgtcgacgacggcagtggcccgcgcctggtcagcgtgcagcaggccaatgccgcccgcccgctgctgaaccgcgccatcgagcggggttacaagctgggcctgcccagcggcggtgctgccgaacaggccctggccggtgccatctggcgccaggacagcgccgccgtggcccgtgcctcctcgcgctactcgccgccgatgcagctgatcggcaagctttaccgcgccaacggtggctggcaggcggactgggtgttcgtcgacaacggccgcgaactgaacaagtggaccagcaaggacgccaacgccatgcgcgcgatggccgccggtgccgacggtgccgccgatgcgctggtcaagcgctatgccaaggccggcgtggccgtcggccaggccggcacctaccgcctggtggtgaccggcatcaacagcgccgatgactacctgcggctggccgctggcctgcgcgaggtgccggtggtgcgcagcgtcaccccgctgcacgcctcggccggccaactggagctgagcgtggagatgaccaccggcctggccggcttcaaccgcatgcttggcgacaatggcgtgctggtgccaagcgcgccgctgccggccctgccgaccccgatcgatgacaccaccggtgccccggtggccgcgccggtcagcaacgagtaccgcctgcgatgatcctgagcccggaagctgaaatcgcgcagttcctgcgccggctgaagtacatcctgttcgccggcctgatcggctgggtggtgtggctgctggcgccgatcctgaccccgttcgtgctggcactggcgctggcctggctgggtgacccgctggtggaccgcatcgaggccaccggccgctcgcgcatgaccggcgtggtgctggtgttcgcagcgatggtgctggtgatcgtggcactgctgctggtgctggtgccgatgatcgagcgccagatcaccaccctgatcgcggccgcgccgcaggcgcaggcgtggctgatgcagaccggcatcccctggttcgagcacaagaccggcctggaagtgatgcagtggctggatccggaccgcctgatcgaatgggtgcgcagccattggcagcaggccggcggcttcgccaccacgttcatgggctacgtctcgcgctcgggctttgcgatggtgacctgggtggtcaacatcctgctgctgccgatcctggcgttctacttcctgcgcgactgggacaagctggtcgagcgggtggcctcggtgattccgcgcaaccagatcggcaccatcagcgcgctggcgcgtgaatccaacgaggtgctgggtgcgttcatccgtggccagttcctggtgatgctggcgctgggcgtgatctacgccggtggcctgtcgctggtcggcctcaagctgggcctgctgatcggcctgattgccggcctgatcagcttcatcccgtacctgggcgcgaccaccggcgtgctgatggcggtgatcgccgcgctggtgcaggcgcagggcttcgacctgaagctgctgatcctggtcggcgtggtgttcaccgtgggccagctgctggaaagctacgtgctgaccccgcgcatcgtcggcgacaagatcggcctgcacccggtggcggtgatcttcgcggtgatggccggcggccagctgttcggcttcctcggcatgctgctggcgctgccggtagcggcggtgaccaacgtgctgctgcgctatgcccaccagcgctatcggcagagcgaactgtacgtgggcgagaagccggcgatcgtgcttgatggcgtggtcgacgcgccccatatcatcgttccggacgacaagggccccgacctgaagtgatgggtgtgccgcaactgccgctggccctgcattacccgcgggaccagcgcctggagaccttcatcggcgcgccggatggcgcgctggcgcagctgcgcgcgatcgcggttggcgccagccacgactgggtctacctggaaggtgcggcgggaaccggcaagacccaccaggcgctggcgatgtgctccagcgccgagcaggccggacggttgccgacgtacgtgccgctggccagcgccgccggccgtgtccgtgcggcgcttgatgggctggaagcgcgcgaactggtggcgctggacggcctggacgaggttgccggcaaccgcgaggatgagatcgcgctgttcgatttccacaaccgtgcacgcgctgcgggcgtgaccgtgctgtacacggcacagaaggcgccgggcgaactgggcctggtgctgccggacctgcgctcgcggctgggccagtgcgtgcgcgtgctgctgcagccgctggatgaggaaggacgggcggccgtgctgcgcgagcgtgcactgcgacgcggcctggccatcgacgaagcggccatcgagtggctgctgtcgcacaccggccgtgagctgggtggattgatcaccctgctggactggctggaccgcgaatcgctggcggcgaagcggcggatcaccgtgccgttcctgcgtcaggtgctggaagaaggccggcctcgttactgagggatgttgttcggcagggctgcgccctgcacccgcggtagtgccggccgctggccggcaacttcaacagcaacgtcaaaagctggcttcctgaggggaggcggggtggctcaggttgcgggggacggcgcaagtacgtccctgtagcctcgatcgcgccatccatggcgctcacgcccccgcaacctgagccaccccgccttcgacaggttcccgcggctgttggtgggtgtcgaccttggtcgacacccgagcaagcgcagcgaagcgacccgcttttgcttttctttctttcttccgtggctggacgcgcacggaaactgtcagaggccgggcgggtgggccatgcaggggcgttggcgccatggatggcgccatcgagcttacagggacgtacttgcagcgtcccctgcatggcccacccgcccggccaagcacgcgatccgctctacgcgaccaaccacgaggggctcagccgttcgccgccaactccgcatccagcgcgcgcaggcgatccaccgtgccgacgtcggtccagcgcccgcgatggtgctgcccggtcatcaacccctgcgccatgaagtgcttctgcagcggcaccaccgagaacttcggtggcagccgctcgctgcccggcgcatcgccgatcaccgcgcgccagtcggccacgatcgaaggacggtacacgccgatgccggcataggtcaggcatggtccttcgcggtcatggtgcaggaacccctgtgcatccaggcggtagtcaccattagggtgctgaaccggattgtcgaccagcaccaggtgcgcctggccctgcggctcgcgcggcagcgtggcgaaatcgaaatcggtccagatgtcgccgttcactaccaggaacggggcatcgcccagcaccgacagggcgttgaggatgccgccgccggtttccagcggggtctgcccttcgtacaggaaatgcaggcgcaggccccactggctgccatcgccaagcgtcgccgggaactgttcggccaaccatgcggtgttgaccaccacctcgcgcacgccgagtgcggccaggcgttccaggtgccagacgatcaacggcttgccagccacttccagcagcggcttgggcgtgtgcagggtcaaagggcgcatgcgctcgccgaggccggcggcaaagaccagtgccttcatcgggctacgcgcatcggtgcacccagctcggccagcgccggcttgatgcggtcgtccagcagctgctgcagcggtgccagctcgcggtagcgcggcagcacttcatccagataggtgatgaagcgcggtgcgtcgtcgaggtaatggcccttgttgtcgcggtaacgcagccggcagaacaggcccaggatcttcacgtggcgctggatgcccatccagtcggcatcgcgcaggaaggtggcgcggtcgggcaccggcaggccggtgtcgcgggcgcgctcgtgatactgcgccagccattcgtccacgcgttgcagtggccagctcaggaaggcgtccttgaacaggctcaccgcatcgtaggcgatcgggccgcgcaccaggtcctggaaatccagcactgcggggccgtcgtcgaccggcatcaggttgcgcggcatgtagtcgcggtgggtcatcagctgggcctggcccagcgcgttgtccatcaggcggcgatgcaccagctgcaggccttcgatctcgccgcagtccagttcaaggttcaggtggcgctgcaggaaccattcgtcgaacaggccggcatcgcgctgcagcagtgcttcgccgaactggccgaagtcggccggcaccgggatcgcctgcaggcgcagcagctgctcgatcgaacgaccgaaccattcgtcagcgttgcgctcgtcgaggatcctggccagggtcgggccgccgagatcttccagcagcaggaagccggcatccaggtcctgcgcgagcagcatgggcacgcgcagaccgttgtcgtgcagcaggccgcgcatgcgcagccacggccgcggatcttccagccccggcggggcgtccatcacgatgtggctgccgcgcgtgctggtggtgcgccagtagctgcgcatgccggcgtcaaccgaagcgcgttcgaccaccgcgttggcatcatcgagctgggtacgggcccactgcaggcgctgcgcgctgcgctggggatcggaggcgggttcggtcatgcgggcatatccgggcgcgccgggcgcgccaacgtcggcaacaggaagggaagggggagcggcgtcagcggcgaccgctgaacaggcgcaggacggccagcacggccaccgcgcccaccaccgcgccgaggaaaccggccggttcgccgggggcgtaccagcccatgtactggccgaaccaaccggccagcagggcaccaaggatgcccagcacgatggtcagcaggcagcccatgcggttgttgccgggcatgaagaaacgcccgagcaggccgacgaagaagccgaccagcaggatgtacagccagctgctgctgccgaacagaccattcatgcgcgcggattccgcttgagtgtggacgcagcctagcaaggccaggctgcgtccgtcacgagtgccggatcagcagcagccgtggtcgccgtggcgggtgccgctgtcggcagccaccggcgagccgctggtctcgccgcgcaggctggcggcgtagtgctcgctgatcaccttggacacgcaggcggtgaccttcttgcccatcgggatgtgcaggaactcgttcgggccatgcgcattggagtgcgggccgagcacgccggtgatcatgaactgcgcgcccgggaacttctcgcccagcatgcccatgaacgggatcgagccgccctcgcccatgtacatcgccggcttgccgaagaaggcctggctggcgtcgtcgatggcctgggtcagccacggcgccatcgccggggcattccagccggtggaggccttttccaggtccagggtgacctgcgcgccgttcggcgggtcgcgcagcagtgcttccttcagcagctcgccgcaggtcttgccatcggcggtcggcggcaggcgcagcgacagcttcaccgaggtctgcggacgcagcacgttgccggccgattccagcggcggcatgccaccgacgccggtgaccgacagcgccgggcgccaggtgcggttgagcaccagctcggtcaggtcctcgttcatggggcgcaggccgtcgaccatcgggaacttctcgaagatctcggtatccaccacttcggcggcacgcttggcctgttccaggcgctcggccgggatctccacggtcatgccgtcgatcaggatgcggccggtgtcctggtcctcgatgcgcgaaaggatctggcgcagcaggcggaagctggacgggatcacgccggaggcatcgccggaatgcacgccttcgttgagcaccttcacggtgaaattgccgccggtcaggccgcgcagcgaggtggtgcaccacagctggtcgtagttggcgcagcccgaatccaggcagaccaccagcgacggcttgccgatgcggtcggccaggtggtcgacgtaggccggcaggtcatagctgccggactcttcacacgcttcgatcagcaccacgcagcgggcgtgcggcaggccctgggcctgcagtgccagtaccgcagccagtgagccgaagatcgcgtagccgtcgtccgcaccgccgcggccatacagcttgtcgccgcgcaggaccggggtccacgggccgaggtcgtcgtcccagccggtcatttccggctgcttgtccaggtggccatagagcaggatggtgtcgtcgccggtttcggcgccggtagccggaatttccaggaagatcagcggggtacggccttccaggcgcaccacctcaaccttcaggccgggcagctgctgggccttggcccagttctccatcagggtgaccgcctgttccatgtagccgttctgcacccaattggcgtcgaacatcggcgacttgttgggaatgcggatgtagtcgaccaactgcgggacgatttcgctgtcccacttgtcattgacgaattggccgagcttggcgctgtccatctgaaactccggttgcatgggctgatccggccattctacgcctgtgccgcaggtagggtttttcctacatcacgtcgggtatttggctggcttacggaaatccgggaaaccgataggctgtgcacatgtggtgacggacactgttcctgccgacgggattgccggtcggggcggccagaatcacagggagatacacgtcgtgccttggtttgtcgtgttgagggcgctggtgctggtagtggggatcgctggggcgcatgccgccgaaccgatcgacatcaaccgcgccgatgcccaggcgctgcagcagggattgacgatggtcggagccgccaaggccgaggcgatcgtcgagcaccggcgcagacacggcccgtttcatcgcgtcgaggacctgacgcaggtgaaggggatagggaaagcgatcgtcgaacggaatcgacagcggatcaccgtaggcaacaggttgttgccggcggatccggtacccggatcggtaccggtgcggaccgtacccaggcgctgacagcaggaatcgtcggaaccggcaggaggctggttcaccggtcacggacaggaaggccgtgaccaccgaccgccgcaggacgcggcaccaatcaccaggatggtggcatcacagacctgtggaaggggctgagatacaaacaggacagacgcggccgcgtgcaggatgcaacgctacccccacagcgcaggatgcgagggggcggcagcaggccgacaaggacgtaacgattgcccggtacgacacatggctgtgtcgccgggcaatttcatttccggcgcctggttttgccgcggccaccacgggccgatggtgtacggtggccgctccgcatggaaaggaccccgctggatgcttgtgcaccgccccacgaccctgatgctcgccctggcactgaccctgccactgctggcccatgccgctgcgccgacgccgacagccaagcctgcggccgaagccagcaccgccgacgtgcgcgggccgaccgacctgaaaccgggcgagtacctgtggcatccggaaatctcgccgaccggcccgatcgtgctggtggtcagcctcgatgagcagcgtgcctacgtttaccgcaacggcatcgccatcggcctgaccacgatcagctcgggcaaggccgggcacgagacgccgaccggcgtgttcaccatcctgcagaaggacaaggaccacaggtccaacctctacaacagcgcgccgatgccctacatgcagcggctgacctgggatggcatcgccctgcatggcggcagcctgcccgggcatccggcctcgcatggctgcgtgcgcctgccgcaggcgttcgcgcagaagctgttcagcgaaacccagcgcggcgatacggtggtggtggccgacgccaagagttcgccgatgaccctggcctatccttcggtgctggccccggtcaacgcgcgcggccaggctttgccggaaaccgagggcggggccccggcgcaggcctggtgggacgacagcgcagccccggccgggcaggtcggcatcctggtcagcctgcatgaccagcgcctgtacgtgctgcgcgatggcgtgatgatcggcgagtcgccgctgaaggccgacgccctgccggcattccagggcaccacgctgttcgtgatggggcagggctacagcgatacgcccagcccgctggacgtgaaccagcgcctgcaccagtggacggcctatccgctgctgggccaggatcgtgcccaggccaccccggacctgctggccacgccctcgttgccaatggcgctgccggccgattttgcccgccagctgtaccaggtgctggtgccgggcacgaccctgctggtgacctcgttgccggcggtccgcccaagcccggctgaatccggaatgcagccggtcttggaatccgagccgccagggtccaccctcaagggcaactgagtcccctcgttgtgcccatgactgcatcccgcctgtgccggctggccgcgttcggcctgctggcgacctcggccagcgccccggcgctggcacagacgcccgcccttgccaccagcgctgatgatctggctgccttgctgtcgcgcagtgcgcccaaggctgaccgccacgtgttgcagctggcggcgcacgccatgcgctgtgcgttgcagcgtccggagctgggcatcaacggtgatcgtctcagcgtgatcgattattcgcggccgtccaccgagccgcgcctgtgggtgttcgacctggcccaccagcgcctgctgttcgaggaatgggtggcgcatggccgcaacagcggcgagaaccgcacccagcacttctccaaccgcgatgggagtttcatgtccagcctcggcgcgttcaccgcgcaggagacctacatgggcggtaatggatattcgctgcgcctggccgggctggagccgggcttcaacgaccgtgcgcgcgaacgcgcgatcgtcatccacggtgcgccgtacgtgaacccggccaccgcgcagctgcaggggcgcttgggtcgcagcctgggttgcccggcggtgcgcctttcggtggccaagccgctgatcgatgcgttgcgtggcggcacgatggtgtttgcttactaccctgaccaggattggctgaagcactcgcagctgctggccggcggatgcggtggccagggcacgctcgctacgcggtgatgcatgatggcgcgtggcgtgatgcaatgcgccgatgaacgtcgactccctgttgcacactccgagccaggtcatttccagcctggactatcgtcgcgaacgctggcggaatggacttggctggacccgcgagatcctgcgcctgcccgcagagggtgatgactgggcgctgcgcctgtcggtggccgagatcgagcaggacgctgcgttctccaccttccccggcgtggagcgagaactggtgctgctgcagggcaatggcgtgcgcctgcgtttcgaggatggccgcgtggcccaggtgctgccgccgcacgggcgggtgcgctttgccggtgaagaagcgctgcacggtgaactggtcgatggcaccacccacgacttcaacctgatgtggaagcgcgagctgctgcaggccgaactgctgcaccggccgctggtggggtcgatgttcttcttctgcgaaccgggcgttgcgtgggcgctgcatctgctggccggacaggcgcagttcggtgccgatagtggcctgccggcgctgcaggcgggagacaccgcgtggttggcggcgggcgagaggcaacggcatgcgctcagcggtggtggcgagttgttggcgatacgggtgagcgcggcgggggcatgattcctgggcgccggtgggcgccatccacgcatggcgtggatctactgctgtgcggttgccaccatgcctgggcacgccgtcatggtgcggctgtggttggggtcagagccctttcctgcggaaagggaaccgaccccgacggttcgttcaatacacatcgcgccggtaacgaccggccagcagcatcgcttccttgcctgcggtacccagcacccgctcgatcactgcatccacgcccggggccatgccctgcaggctgccgcagaccaggatcgtcgcgccttcatcgacccactgccgcagcgtcgccgcttcggcctgcagccggtcctgcacatagcgatgcgcgccgccgtcgcggctgaacactgcatccagccgtgccagcgtgccgctggccagcatcgcctgcagttcttcgccgaaatggaagtcgtgcgcggcggtgcgctcgccgaacagcagccaggtgcggcgagcgccgcgctgggcacgttcgtgcaggtgcgcgcgcaggccggcgatgccggtgccgttgccgatcagcagcagcggtacatcggtgggcacgccatggaaattgtcgttgcggcgcagccgcagttgcaccggttcgccgatgggcgcgtggtcgcacagccagccgctgccgatgccgggtgtaccgtcggcgcgcagttggcggcgcaccagcagctccaccgcgccgtcggccatcaccgaggcgatcgagtactcgcgatgcggcagcggttgcagggttgccagcagtgcgggcagatcacccgggggaaccagcgagggcagatgcgagcgctcgatacgggccagtaacgcctgcccgtcatccagcacggtgtctgcattgaagccctgtgcatcgagccaggcgcgcgcgctgtggcgtgggtgctgcgggccgatctcggcgatgtcgccggcctgccactgcacatcgacgccaggcggtggctgcaggcgcacccggtacaccgggccgccggggctgcccggattcagatgctggcgttgcggcaacgtccacggctgatactcggccgggctccagtcaggcagttcagtggcgcctccgccaagttgtcccagcaactgctgccaatgtcgcagcgccgccggatcggcattgtcgacctcgatcgcatcgaacagcgggtgcgcgccatgctggcgcagccactggtccagctggtggccgaatccgcagaagtggccatagctgcggtcgcccagcgctagcacgccgtactgcagatgctgcaacggaggcggcgcggccatcaccccgcgcaggaaccgcagggcgtggtcgggcggatcgccttcgccggtggtgctggcaatgaacagcgcgcgctggctgtcggccagcaatgccgcatccacctcgtgcagtccgcgcacacgcaccggcacgccggcaccacgcagggcctcggcactgcgttcggccagttcgcgggcaaagccggtctggctggaccagaccagcaggagcggtgcggtatcggcggacgccgcatcatcgcgcggacgagtgcgccaccacagggctgcgcaggccagcgcgtacagcgcggtggcgatgatggcgatctgcgattgccgtgccggcggtgcgccctgccaccaggcgtcgccgaggtgcaggcgcagcagcgcccaggcgatcagcgccagtacgatcagtacaagtgtgttgccgagccacgcacgcgatggccgagtgctcatgcgtcctgcccgtcgagcaggcgctggaaggcgctgctgagaaattcctgcggggcgtctgcggtgcgttgcaggtagcgcgcggccagtccttcgcgctcggccagcgccatgccctgttcgcgacccagcacggtcagtgcggtagcccaggcatcggcgtgcatggcgtcgtcggccacgacggtgaccgctgcggcgacctgctgcaccggcctgcccgtacgcggatcgaggctgtggctgtaggcctcgccatcggcctggtactggtgccagcgatcgcccgaagtggccaccgccttgccgtccagcgccagcacccgtggcggggtttcggtgtgcacatcctcttccggtgcggattccaccagcacgcgccacggttggccgtccggtttgcggccgtagccggccagttcgccgccgacttcgatcagcgccgccccaatcccttgcctacgcaaccaggcggcgacgtgatcgacgccgaagcccttggcgatcgcagagagatccagttccagccggcccggttgcagcagcgcatcatcctgccactgcaggcgctgccaaccgcaacgctcacgggtggcctgcagggtagcggcgtcgggctggcggcgttcaccggcatgtgcaccgaagccccacagtgcaaccagcggaccgatggtgggatcgaaggcgccgtcactggcggcagcgatggcctgtgcgcaggtcacaacgtggcgggtctccgccggcagcacgcaccattggccagcgtcggcgcggttgtagcggctcagatccgagccgggctcccaggtgctcatctgcgcgaccacgtcgtccaaccgcgcctggatgccggcgtgcagcgggtgcaggtcgcgctggcgcgacgcgaccagcgacacgctccaggtggtgcccatggtggtgccaccgaggcgggcgatgtcgagatgggaatcggtcatggtgatgcgttgcggtggcgatgccggggaacgcccggcatcgcggtccacattactgcggcagcacttccagcgtggcgacgtagctcaggcggcgcttggcggcctgcttcaccgacgtcttgttgtcctcggtgccggtctccagccagtacatgccggcttccggccaggtcaccttgatctcgcccttggcatcgctggtcagcttcagctcgtcctgcgcgttgcggtagcgggtggcgccacgcacgatctcgaactgcaggccggcggtcggcttgccatcgaccagcacgcggaaggtggcttcctcgccggcgaacaggtcgttcgggtggccgacggcgaccagctcgatgccacggttggtcggcttcagcgcggtgtcgttcggcgcaccgttggtgacaaaggtctccacgcggccgatcgactggctcacttccagcttcttcgcgtccttcggcaattcaccgaaggtagcggcgctgccgcgccagcgcttgcgctcgccgttctgctcgtacgtggcgaacaggccgtcattgaccgacgcgatgcggtaagtgcccgactgcttcagttcgatgtcgaacacgctgcggtacttgccggtcgacgcgttctgcggctgcacggtgctgccgtccggcgcggtgatcaccagcgattccaggcgcagcggcacgtggttgaagtagaacagatcgttggagaccgcaccgtcgacggtgatccacggcgcgttgccggcgatcacggtctgcgagggcagcagccaggccttgtgggccagggcggagaagggaagggcagcggccagggcggcggcgaggacgagcgtgcgcttcatgcggaagactccagttggaaggggtcggatccctttccagcggaaagggctctgaccccgagggatagggcgatggggtcagagcccttcctgcggaagggatccgaccccggctcaggcagttatggtttgacggcgagggtgacctggcccagttcggtggcgccctgcgccttgccgttctgcgcggcggtggccggccaagtgaaggggatcttcagcagttcgcggccaccgacttcgcgtaccgcttccaccaccagggtgtagttgcccggggccagttgcttcagtgccggctgcctgtcgttgaacgacagcgcgtgcttgccggccgggcgggtcgggccggtcacgccgtccaccggcacctgcagggtgcggccgctcttgcgccaccactggcgcaggtccggcagccatttggtgccgtggccttcgctgttgctggtctgctggtaccagaccgacaggttggccgcgaccttctggtcggcgccttccagccacaccgccacgtacgggcggtggtactcggccacgttgagcttgggcacttcgacgttgatgtcgagggtggtggcgtacgccggcgaggtggccagcaggccgctgagggcgatggtcagggtgacgcgcatggggcggctccggaaacgaaggaaagtcagtggatcagcagcagggcgatcagcagcggaatcatcaggccgaggccgaccagcggccaggtcatgcgccgctggcgtgcatgcaggtgcagcaggaacaggccggtgatgcagaacaccaggcaggccacggcgaacaggtccaggaaccagccccacgccgggcccgcgttgcggcccttgtgcaggtcgttgaggtaggacaccgcgccgcgcgaggttgattcgtactccaccgcgccggtcccgcgatcgatgctcagccaggcgtcgccgccggggcgcggcagcgacaggtagatctcctcggccgaccactctgccgggcgcccgccgatggcgatgcccagctgcgtgtccagccagtgccgggccgggcgcggaatcggtgcattgccgttttcgcgcgtgccgagctggccgagcagatcggccggcagttccagatgctggttctgcacctggggtttggcttcgatcttcgcggcgtggttgagggtcaggccggtcaccgcgaacagcagcatgccgatcaggcacaccgccgagctgatccagtgccactggtgcagcgtccgcagccagaagccacggttctgttgctgcgccacggtggaagaggcaggacggctcacggcacggttcgaggcggacggggactgcccattacatcattgatgagaatagctcgcaattgcgtgtcgttctgtatcgctggagggcgattgccggccagcggccggcactaccgatcggtagatccacgccacgcgtggatgaagcggtgccgaccaaggtcggcacccaccggggccgggcgcggcgatcagaacttcgcgttcaacgagatccagtagctgcggcgctggtccttggtcgcgtagtcgtccacgcagttgaactcgctctggctgatcagcaggcacgactgcgaaacgaagtccttgtcgaacaggttgttgacccgtgcgttcaccgtcagccatggcgtggccttccagctgccaccgagatggaagatggtgtagtcctcgtagtagcgggtgtggctggcgccgttggcgtccggcagcgtgtcgcggtagcggtcgtagcggccttcgccgatcagcgacaggctgatcgcttcgttgacctgccagttgaggcttgcattggccatgtgcctggccggcatcgtgccgctgatcggcaggcccttctgcgcgccgctggtctgctcgctcctggtccaggtgtagttgccgcgcagctgcagggtgtcgagcaggtcgacatgcgcggccagttcggcaccgcgggtctcggccttgtcgatgttcacgctctgggtgaacgtgctgtagcccagtgccgcccagcccgggccgatgtccacgcagtagccgctgccggcgcgggccacttcgcagttcgcaaaggtgccgccgctggcgatcttgtcttcgaacgtgttgaagaagccggtgacgttgaagccccagcgctggccttcatagtaggcggccagttcgtagttggtgctggtttcaggcttgaggttcggcgaaccgaccagtggcagcacgccctggccaccgaagccggtgatgcccgggaacagctggtccggacgcggggtcttgtagccggtgctgacgccgcccttgaaggtccacgcatcgctggcattccacaccaggtagccacgcggactgacatggctgccgaatacgttgtggtcgtcgtagcgcaggccgaaggtggcggtgagggtgtcggtcagcgcccagttgtcctcggcgaacagcgcccacatgcggtgcgtctgcttgacgttgctgcggtagccggcgccatccatgccgaacacaccgtcgaccatgtcagtgtcgttgtactggccgcccacggtcagcgtgtgcgcgccgaagtccaggtcgagcatcgtgtcgagcacgtagccttccagttccatggtgcgcagcgggcgcggcaggaacgcctgcaggcgcgccatctcgctcgggttgagggcagccagggcgttgccgcggccggccgcacagttgttggcagcaccggtgcggcggcagacgtcattccatagcgtctgcaggttggcgcgctcttccagggtcagcggcagcgaacggcccaggttgctgctcttgctgtgggtcagcgaggtctgccaggtaccgaagctgtagcggccctgatgggtcagcgacaactggtcgcgttcgtagcgctggtaggcggtgtagcccacgcgcggctgcaccacgcgacgggtgacggtaccgctgccgttcgggttgggaatgacggcattgccgacgcgccacaggctggccaggctgtcgagggtgccggtctggccttcgctgttgtcgaacttctgccgcgacacgtcgtagtccagccacagttcgtgatcgtcgttgatgcggacgtccaaccgcacgccgctgttccagttggtgttggccaccgacttgccaccaccgccgaagccgatgctgcgctcccacagggtgccgtcgggcagggacaacgcatcccattccgggttggaagccttcgcgtcgtagtagttgccgcgtactgccaggctgaggcgctccttcagcaaagggccgctgaggtagaggtcggtggtgcgtgcatcgccgaactggtcgtcctgctgcacggtgaagccctggctgaccgaaccgtgccagctgtcctggtttcggcgggtgatgatgttgatgacaccgcccatcgcgtccgaaccgtacagcgtggacatcggcccgcgcacgacttcgatgcgttcgatcgcatccagcgggggcaggtaggcgaactggccgccaccgaagttgttcggatagatctggccgacattgctctggcggcggccgtcgatcagcaccagggtgtactcggacggcaggccgcgcatcgacacggtggcgcggccgttcttgtcggtcgcttccaggccgacgtcgatgccttcgacgtcgcgcagcgcatcgaccaggctggtgtacgggcgcttgctcagttcctcgcggctgaccacgctgatgctggccggggcatcgatcaccttctgctcgaagccggcggcggtgaccaccaccttgtccagcgtctgcggcgcgcctgcggcgtcaccgtgggcgaaggcggggctggcgaaagccgccagcacggcgctggtcagcagggtacgggacagggacgaacggacacgatggcgctgggccatggcagttacctcgaaggatgcagggtggcgcggtgccgtgcgcgaagggcgcggcaggcacggaagggccggtcaggggcggcagggattaagcaggcagcggcgtgcaggcgcgaccgcgcaggcggtcacgtcgggccgtggatcaggcgagcggcggcgcctggccgcgttgctgacggcgcccgggcgcatcggcccagggcgtgtccggagcggccagcggccagtccgcgcgcacgccgggcatggccggcatggggggtacgaggtcgagctcagtgcgcagccagtggctggccagcagcaacggcgggcgtgccttctcggccgccttcaccggagcggaggcgcagcggcgcagcttggccggcgcctcttcctgcaggggtgtttcgccgccacgttcttccagtggcatctgcacggccattccggcctgggcctgtggcagcagcggcagggtgcccagcagcaacgccagcatcgccacccacgccagcaggctggccagcgcgggacgatggccgcgcatggcggtgcccatcttgcgatggacgagtgggcgagggcgaagcgggcgcagcaagcgggggtccccaagggtctgccggcagcggccggcatcaacggggcgtgattgtaatgagagctgttagctgttgcaaatgagaatgattgccaaaatgtcgcaggccggcccggcaaggctcagacttcgctccagcgccgcagcaggttgtggtacacgccggtcagctgcaggaccgcctcggcgtcgccgccggtctgccgcaggcgctcgatcgcgccatccatttcccacagcaggcggcgctgcacatcgtcgcggatcatgctctgcacccagaagaacgaggccacgcgcgcgccgcgggtgaccggccgcacctggtgcaggctgctggacggatacacgatcaggtcgccggccggcagcttcacttcgtgctcgccgtaggtatcgctgatgatcagctcgccgccttcgtattcgtccggcgccgacaggaacagggtgcaggagatgtccgaacgcagctgttcgccattggccaggttcatcaccgcgccatcgacgtggtagccataggtgccgccaccgctgtagcggttgaagcgtggcggcaggtacttcagcggcagcgcggcactgaagaacagcgggtgccgggccagcgcgacgaggatgatctcgcccagttcgcggcgcagcggcgaagcctcgggcagctgctggttgtgcttggcctgtgcgcccagatgccccacggtttcgcggccatcggtccagtcggcggcgtcgaggcggcggcggaagtcggcgacctggtcggcgctgagaatgtcggggatgtgcagcagcatgcgggactcctcagagggacggcggtgcgaccagggcgcgcacctgtggatgcggtgacgcggccagctccggcacgatgtgcgccatgaatgccgggctgccgtgcgccagtgcgagccgcagccagtgcacggcctgctcgacctggccggcctgcagcaggatcgaggcgtagttggcctggccgcggaaatcaccggcctcggccgcgcgctggtaccaggccagcgccgcctgcggatcgggtgcggtatccagcccgtcttcgaggtggcgggccagcaggttcatcgatttggcgtggcccaggtgcgcggcacgggtgtacagggccagtgcctgcgcgcggtcctgcgcaatgccgcggccggtggccagcaggttggccaggttgtacaggccccagtccaggccggtgtcggccgcgcgccggtaccacaccgccgccagcgccaggttgaccgccgtgccgtggcccagctcatggcagcggccgagcatgttcatcgccatcggcgcgccgttgttggcggcggtttcgtaccagagcagcgccgccgaggcgtcctgtgcggtgcctttgccttccatgtgcatctgcgcgagcagcagctgtgcatcgacctgcccagcctgcgcagcgtcgcgcacgcgtgcgaacgcggcctgcggatcgtgctgcagcagctcggccagggcgtcgctgtcgatgggggtacgggttgccatggggtgagtatcgccggaaacaaaaacggcggcaggagagcctgccgccgtggtggagcgaagctacatcagaacttcacgttcagtgccagggtggtcgagcgacccggggcgatgctcgcgtagtgcgaggcataggccttggtgaagtaggtcttgtcggtcaggttctgcacgttgagctgcaggctgatgttgtcctggatcgcgtagctggccatcgcgtcgaagcgggtgtagctggcgatccacttggtgttggcgacatcaccgtactgcttgtccgagtagaacgcaccggcaccgacggtcaggccgatggggaagcggtaggtggtccacaggttggcgctgtgcttggcggtgttcgggaatacgttgccgttgtacggcgagggcacgtagacgttggacgggcaggtgcggccgaccggtgcaccacagacgaagccgttgtccttcagttccgagtccaggtaggtgtagccgccgtacaggctccaggcgtcggtcagctggccggtgaagcccagctcgaagccgttgatttccttcttgccggcattctggctggtgccgttgtcgaccgtcacgcgcgcgttgttcatcaccgtgtggaagatcgccgcggtgaggttcaggcgctggtcgaacaggtcccacttggtgcccagctcgaggttcttcgtatcctgcggcttgaggtcggccacggcggcgctcaggccgtccgaaccatcaccaccgtccatgcccggcggagtcgaggaggtgccccacgacaggtagatgctgccgttggcggccggcttgaacaccacgccggcctggtagttcaggaagtcgttgctgttgcgcacgcgggtcggtgccttgccggccaccggggtggtcagggtggtgcggaagtcgtcgtagcgcaggccgaggttgatcatccactgctcattgagctcgatggtgtcgaacacgtaggccgaggtggtcctggtgcgctgctctacgtccagtgccttgtcgctgcggtacaccgaatgggtggccgcccacggatcgcgcgggttcggattggcgaaatcggtgcagttgtagccggtggccgcgccggtggtcgggcacttgctgttgccggtgagcgggttgctggtgcccggagtcatcagatagctgccgcgggtcatcttctcgtcgctgtattccacgcccgcgctgtagctgtgcttgagcgcaccggtctggaaggcaccggtcaggcccagctggtcggcgaagctcttgacgtcgacggcacggctgttggtccggcgccacagggtgccgtagttgttcgggttgccctggctgtcgtccggctgggtccacaggtagtcgttgctggtgttgcccaggcgcgcgatgttgcgcagcttgtggccgccaaagtcgtagctggcatccagggtgctgatgtcggcgcgggtacgctggaagtcacggtcgaccaggccgtagtagttgttgcggtccggcaccatcgggcggccgtcgacccacttcgaggccggcgcaccgttcgggttgccatacgggaagccacccgcgtccggcaggtcatcgctctgcatgtggtagtggctggcgatcagctgggccgggccgttcaggccgaacgcgatcgacggcgcgataccccagcggctgacattggcggcgtcacggccagcgatgtccgattcgtgcttcatcaggttcaggcgcgcggcgatgccatcgcccagcacgtagttggcgtccacggtgccgcgcgcgtagctgtcggtgccgatgcccatgctggcgctggtctcgttcttcagcttcggcgtcttgctgaccaggttcaggctgccaccgccggaatcacggccgccgtaggccgagctcgggcccttgactacttccacctgctccaggtcgaagatctcgcgggtctgcgagccgacgtcgcgcaggccatcgacgaagacgttgctctgcgaatcgaagccacggatgaaggggcgatcaccggtggggttgccgccttcgccggcaccgaaggtgatgcccggcaccatgcgcagcgcatcctgcaggttggtcgcaccggtttcggcgatcagcttctccgagacgatcgacaccgacttcggggtgtccagcagttcagcggtgaacttcggcgaggacggattgaaccagctgccgcgcacctgcaccttgtccagctcggtggccttgcgggaggaggctgcgtcagcgctgtcggccgcctgtgcggccaacggcgcgaagccggcggccagggtggcggtggcgagcagggaaacgcgcggggcgcgcttgcgggacgtgatgtgggtcatggcttgggtggtagtggctgggatcggaaaggggcgagggccgaagcgcagacagcgcgacggcatgtagagggcgttttctgtagagccgagccgatgctcggctgggcggcggacgactccaggcgcacggcaatggccgcagggcgcctcagctggcgtgcggtgcgggcggtgcgtggccggggttcaaccgcagtgcgggatcgtgcagctgccagtgcagggcatcggagcgccacagcggaacatgcgcgaccagggcggcgcgcgggggagccagtccggtacagggcgttgtgccctcgccatccagcggcggctccggtgctggcaccgcatggcgcgggcactcgtccgccggcggggccggcatcggcatagcctgctgaagatcttcagcgtgtgcctgccagccgtaggtggcgggtccatcgcgcccttcgtgcagggccgaccagcccagcagcagcgtcagcagcagggccacagccaacggccacccatggcgggcaagctggcacagcgtggcggcgggcgcgggcaaagccatggcgcaggggacggagtcgttacgaagatgttacgtaggataacatcaacgataatgattcgcatatgcgcgggcgaacgagcggtctggaggcccggggggcccctgaacgcctctcagcgcgctccgctggcttccaccccctgggcggagtcgccggcggccgaacgccgcgtcaatcgcggtcgtcgcgggtccagacggcgtcgtgttcgcgcttcaccgggaacttgggtaccggcgtataggccggggcgcacagggcgcggccatcgcgcacgtcgaagcgcgcgccgtgcagcacgcattccacgctgccttcgtcggtgttgaactcgcccgaggacagctcgaactcctcatgcgtgcactggtcttccagcgcgtacagctcgccgtcgaggttgaacaccacgatcggcgtgccggtcacttcgtcgaacacgctcttcatttcaccgggcagcagctcgttgccggcacacacgaaggtccaggtatcgctcacgcggcggctccggccagtggcttttccaggacctcgaagcgcaggtcgtcgcgcttggggattccgaagcgttcgtcgccatacgggaacggcttcttgatgccggtacgctggtagccgcggcgctcgtagaaggcgatcagttcgtcgcgtacgtcgatcaccgtcatctgcatcaccggcaccttccattcgcgtgcggcgtgcgcttcggcggcgtccatcagctgcttgccgaccccgccgccctgctgggcaggatcgaccgagaacatgccgaagtagccgttgccgtcgacgtcggcaacgtgggcgcaggccaccagctggccctcgcgctcggccagcaggatcgtggagcgcgggcggtcgaggtcggcctggatgccttcggcgtcgatgcgggcgccatccagcaggtcggcttcggtggtccagccaacgcggctggcgtcgccacggtaggccgaggtgacgagggcgatcagggcggggatgtcggccggcgtggcggcgcggaaggtcagggtgctcatggccccattctaggtggggcgtgggcgggcgcaaatgggggagtggggtcagatccctttcgcaacgcgaaagggatctgaccccggcatctactgactcaacggcaggccatggaccgactggcacgggcccggaatcggcagatgctcggggtcagatccctttgcgcagcgaagggccctgaccccctgctaccaggagcagcccatgccaaggccacggcgcatcgatgcgcccggatatccgcaacatgtcgtccagcgcggcaacaatcgtcagcgcgtgttctttgcggatggcgaccgcgtcgcctacctgcgcctgctgtgtcatcacgcaggtcagcagcagtgccgggtccacgcctatgtgctgatggacaatcacatccacctgctggcgacacccgatgtgtccggcggcttgtctcggatgatgcaggcggtaaaccgggcctacgtgcgccgggtgaacgatcgacagggccgcacgggaaccctgtgggaaggacgtttccattccacgcaggtggatacggatcgctatctgctggcctgccagcgctacatcgagctcaatccggttcgggcggggaaggtggcgcatcccggtgactatcgctggtcgagctatcgtgccaatgcgcgtggcaggcccaatgcgctgctcgagccgcattcggcatttgagctgatgggttctgatgcggatgaacggtgcaggcgctatgtggagttcatcgaggcgggtattccggcgggggatctgctggcgatccggcgggcattgcagtcgcaacggcggctgtcgggaatgctggtggggtcagatccctttcgcgtggcgaaagggatctgaccccggtgtgctgcgggcggtatgccgcgttcatctggtcgcgatccggcgggcattgcagtcgcaacggcggctgtcgggaatgctggtggggtcagatccctttcgcgtggcgaaagggatctgaccccggtgtgctgcgggcggtatgccacgtttatctggtcgcgatccggcgggcattgcggtcgcaacagcggttgtcgggaatgctggtggggtcagatccctttcgcgtggcgaaaggaatctgaccccggtgtgctacgggcagtatgccgcgttcatctggtcgcgatccggagggcattgcggtcgcagcggcggctgtcgggaatactggtggggtcagatccctttcgcgtcgcgaaagggatctgaccccggtgtgccggctcagcccagaagcttgcgtaccttggtcagcgcggtcatgaagcgctcgatctcggcgtgcgtgttgtagaacgccagcgaggcacggcaggtggcggcgacgccgaagtactgcagcagcgggtgtgcgcagtgctgccccgagcgcacggccaccccttccaggtcgagcagggtggccagatcgtgcgcatgcgcgccatcgatcaggaacgagaccacggcggccttctccggcgcttcgccgatgatgcgcaggccgtcgacgcggcgcagctcctcggtgaagtgcgccagcagttcggcttcgcgggcttccacgttctcctggccgagctgctgcaggtagtcggcggccacgcccaggccgatgaaaccggcgatgttcggggtgccggcttcgaacttgtgcggggcatcgttgaacacggtgccgtcgaagctgacttccttgatcatctcgccgccgccgaggaacggcggcatcgcgtccaggtgctcgcggcgcgcccacagcgcaccagtgccggtcggaccgcacatcttgtggccggtgatggcgtagaagtcgcagccgatcgcggcgacgtcgaccttgcggtgcggcaccgcctgcgagccatcgaccacggtgatgatgccgcgcttgcgcgcttcacggcagatctcgcgcaccggattgaccgtgcccagcacgttggagacatgggtgaccgccagcagcttgacctccggggtcatcgccgcgcggagcgcatccaggtccagcgcgccatcgggcgtgatctcggccacgcggatggtggcgccggtacgttgcgcgaccagctgccacggcacgatgttggcatggtgttccatgcgcgtgatcaggatcacgtcgccggccttcaatcgcggcagcgcccacgagtaggccaccaggttgatggcgaaggtggtgccgctgcacagcaccaggtcgctggcgcgcacgttgaggaagcgtgccagtgtattgcgtgcgccttcgtaggcgtcggtcgcttcgctgcccagtgcatgcaccgcgcggctgacgttggcgttgtagcggcggtagaactcatccaccgcgccgatcacctgtaccggcttctggccggtgttggcgttgtcgaaatagaccagcggcttgccgtgcacttcacgcatcagcagcgggaagtcgaggcggacgcgatcccagtccggggcgccggtgcgttcttcgatcgggcgtggcgtggacaggttcatgccacacccgcctcggccagggccttgtccaggcggcgtgccagctgctcgcgcaacgcctccggcaggatcttcagcggttcatggcagaacgcagcgctcagcagtgcctgcgcctggacctggggcaggccacgcgagcgcaggtagaacagcgcattggcatcgagctggccgacggtcgcgccgtgcgcggccttcacttcatcggcgtcgatcaccagcgtcggctgggtgtcgatctcggcatcggccgacagcagcaggttcttgttggacaggttcgcgtcggtgccgtcggcgccttcgcggatctggatgccgccatggaacaccacgcggctgcggttggcggcaacgccgcgccacagcagctcgcaggaggtatcgcgcgcgatgtggtcgatgcccaggcgggtctcgacgtggcggcggccattgccgagcagcacgccgttggcggtcagccgggcgttgtcgccttccaggcgcacgttcagttcgtggcggctgagcgcggcgcccagttccaggtccacgcggtggtactgcgcgtcgcgggccagcaccgcgtcggtacgcaggaagctggtctggcgggcgctgccggcctgcacgcgggcgtgcttgagtacgccatcgcgggcgacgtgggcatgcagcacggtgttgtccaggtgggcggagtcacccacgctgaagcgatgctcgaccacgccgaggctggcgccggcgcgcagttcgatcaggtggcgatggtgccaggccaggtcggcttcgccggcgacgctggcgaataccagctgcagcggcgtttcgacctgcacgccttcatccacgcgcagcaccacgccttcatcggccagcgcggcgttgagccgggcgaagatctcttcgctgcgctcgtagcgacggccaaggaaacgcacggcgtcttcgccagcggccagtgcggccgacagcggctgcagctgtacgccggacggcagggcctgcacatcgctcagcgcggcatccaggcggccgttgacgaacaccaggcgcggcgccgggatgtcgtccagcagcgcggcgtccagcgccgggccctgcagcggcgctgcagcgaacgcacgccgttccagctggcgcagcgaggtgtacttccaggcttcattgcgggcggcgggcaggccgtcgcgcagggccgcatccagcacttcgcggcgcgcatcgctgccacagaaggcctgggccatggagtcaagcagggcgctcatcagaccgccgcctcgggcacgacccggtccttcaggaaatcgtagccgtgcgcttccagctccagcgccagctcggggccgccgctcttgacgatgcggccatcggccagcacgtgcaccacgtccggcttgatgtagtccagaaggcgctggtagtgggtgatgaccaggaacgaacgctcggcgccgcgcagtgcgttgacgccgtcggccacgctcttcagcgcgtcgatgtccaggcccgagtcggtctcgtccaggatcgccagcttcggttccagcacggccagctggaagatctcgttgcgcttcttctcgccgccggagaagccttcgttgacgccacggtgcagcagttcgtccttcaggtgcagcacggccagcttctgccgcaccagcttgaggaactgcatggaatcgagttcttcttcgccgcgcgccttgcgctgggcgttcagtgccgcgcgcaggaagtaggtgttgttcacgcccgggatttccaccgggtactggaacgccaggaacaggcccgcggcggcacgtgcttccgggtcctgttccagcaggtcgacgccgtcgaactgcacgctgccttcggtcacttcgtagccgtcgcggccggccaggacgttgcccagggtggacttgccggcgccgttcgggcccatgatggcgtgcacctggccgggcttcacatccagcgacaggcccttgaggatttccttgtcgccgatgcgggcgtggaggttttcgatcttcagcatggtgggggtttccgtggggcgggccagggcccgccggtaaagagaatgcgtttgcgaggggcaggggcggcagtcagcccaccgaaccttccagcgagacttccagcagcttcttggcttccaccgcgaactccatcggcagttcgcggaacacctgcttgcagaagccgtcgacgatcatcgacaccgcgtcttcctggctgatgccacgggcgcggcagtagaacagctggtcatcggagatcttggaagtggtcgcctcgtgctcgacggtggcgcccgggttcttcacctcgatgtaggggaaggtgtgcgcgccgcactgcttgccgatcagcagcgagtcgcactgggtgtagttgcgcgcgccctcggcgttgcggtccacccgcaccaggccgcggtaggtgttctggccacggccggcgctgatgcccttgctgacgatcttgctcttggtgcgcttgccgacatggatcatcttcgtgccggtgtcggcctgctggcggtgatgggtcagcgcgaccgagtggaactcaccgaccgaatcgtcgcccagcagcacgcaggacgggtacttccaggtgatcgccgagccggtctcgacctgggtccaggtgaccttgctgcgcgcgccgcggcattcggcacgcttggtcacgaagttgtagatgccaccgacgccgttctcgtcgcccgggtaccagttctgcaccgtggagtacttgatctccgcatcttccagcgcgaccagctcgaccaccgcggcgtgcagctggttctcatcgcgcatcggcgcggtgcagccttccaggtaggagacataggccttgtcctcgcacacgatcagggtgcgctcgaactggccggtgtggccggcgttgatgcggaaataggtgctcagttccatcgggcagcgcacgcccttgggaatgaacacgaagctgccatcggagaacaccgccgagttgagcgcggcgaagtagttgtcaccgaccggcaccacggtgcccaggtactggcgcaccagcgccgggtgttccttgatggcctcggacatcgagcagaagatcacgcccttctcggccagttccttgcggaaggtggtgcccacagataccgagtcgaacaccgcatccaccgccacgccggccagcttggcgcgctcgtgcagcggcacgcccagcttgtcgtaggtgtcgagcagttccttcggcacatcatccagcgaggcgtacttcgggcccttcggcgcggagtagtagctgagcgcctgcaggtcgatcggcgcgatctccagcttggcccagtccggcatcggcagggtcaggaagtggcggtaggcatccaggcgccactgcgtcatccactccggctcgtccttcttggccgacagggcacggatggtgtcctcgtccaggcccggcggcagggagtccgactcgatctcggtgatgaagccggccgaatacttgcggccgagctgctcgtggatctcgcggttgggggtgtcgtcgtgggcgacgttttcgatggtttcggtggccatgggggctgcctacggatcaggagacgacgtcgacagcgatggtgcggcgctgttcgtcatcggcaagggggagagggggcaggatctgcgcgagggtgacatcgcgcagggcctcggagaccacgtcgttgatcagccgccagctgctgcgcgcgccgcacttgggcgccatgccgcactggtggtggtcgtggctgcattcggtcagggccagtggcccttccatcgcttcgaccacttcgaacagcgagatctcgatggccgggcgggtcaggcggtagccgccacggacgccacgcaggccttcgaccaggccggcctgggccagtggcttgagcaccttgctgacggtgggcggctccagaccggtgaattcggccagctcggtggcactgagcacttcgcccggacgggcggccagcacggtcagcacgacggtggcgtaatcggtgagtttggtgacgcgcaacatgcggatgcgagtggttcttaaagcggactgaaattgtacgcttttattcgccaccatccaacccgggcattcagccggcgcttgggccaagccgggaggacacaccgcggccgttgccggggcgcaatgctgcgccaacggggtgattttcgcaatcacccggaatgggcgagaatccccattccattcgctgcaaacagccctcgccgatgccgaagaagatccaagcccgcaagtccgccatccatggcaacggcgtgttcgccgtggccccgatcaagcagggcgagcgcgtgatccagtacaagggcctgctgcgcagccacggcgacgttgatgccgatgacagcggcgacgtcgaaagtggccataccttcctgttcacccttaacgatgactgggtgatcgacgccaactacaagggcaacgacgcgcgctggataaaccacagctgcgacccgaactgcgaggcggtgatcgaggaggacgaggacggcgacagccggggcgacaaggtgttcatcgaggcactgcgtgatatcaaggccggcgaggagctgacctacaactacggcatcaccctggccgagcgccacactgccaagctgaagaagatctgggagtgccgttgcggctcgcccaagtgcaccggcacgatgctgcagcccaagcgctgatcggtaccgggtagtgccggccgctggccggcaaggcgcaatccaggtgccggccagcggccggcaccacccggcggctctccacctgccgtgcacgacagggtcaccgccgcgcaagggccgttcttccattctgtgggctcccccaaccggagtgcctccatggcagagcgattgaagggcaagcagattgccatccttgccacccacggcttcgaacagtctgaactgatcgaacccaagcgtttgctggaagcggaaggggcgcgcgtcagcgtggtctcgcccgcaaaggaagcgacgatcaagggctggaaggagaagaactggggcgacgccgtcgcggtggatatcccgttggatgaggccgatcctgcacgcttcgatgcggtggttctgcccggcggggtcatcaatccggacacactgcgcaccgatgatgccgtactggccttcatccgttcagtggatgaagccggcaagcccgtggcggcgatttgccatggcccgtggctgctgatcaacagcggcctggccgatggccgcgagctgacctcctggccttccctgcagcaggatctggcgaacgcgggtgcgacatggcgcgatgccaaggtggtggtcgacggcaacgtcatcaccagccgcaagccggatgacattccggctttcagcgaggcggtggtaaaagcgcttgccgcctgatgcgctaccggtagtgccggccgctggccggcagatgcagtgacgtgctgccggccagcggccggcaccacctcatttgcccagcaggcctgccggtaccaggttgcccaggttctggttgaaagtgaccaccagcttgccgttcttcacctgtgccgactgcacctgcagggcgccgagcaccccggccacggccgggtccagcttgtagatcggttcgcgctgggcgtagtcgctcagccacgcattgagcaggccacgggtgcgtgagtcgaggcggccgccctggttggccggggtgaagtcatccacgctcggctgctgcaggtgaaagccctgggtctgcgcgtcgtagcgcaggccgctgctgagcttcaccgtgcccagtcgggccgggttgccgcccgcggtggccagcgcgacgtccatgcccaggttcaaccgttcgccggccggaaggctcagctgcgggtggctcatggtcagggcgatcaggccgccgagggcgtcctgggtgcgcgggaagctgccatcgaggtactgctgcacgtcgctggcgcccaccgacagttcgcggccggaaatggagggagccgcctgtgcaccgatcgcagcggcgatcagcacggtggaggccgcgaggcgggtcatcagggaacgcaggcgcatgtcggtgaccggtgggaagcagatggatggatcaaagagtagccgcgcaggctgaatcgcgcgtgcatgccgctgcaacggttcagtccagcgttggacgcagctgtgccgactggatctgccaggcgctgccgtcgctgctgggctgcacgcggtaccagccgccgaagcggaacgtgccattggcggtgaccgcacggatctgcacagggacttcaagcagccgcggtggctgccggtcatctcgggcgatcggggtatcgctgtgcaggcgcagcgtgcgcaggtcctgcagctgccgcagcgcggcgtcgtctgcatgccgcgggtcgccgggtgggatcgtccaggcagcatcgctggcggcgcggtcgcggttgagcagtgcggcgacgtagcggttgagcatcgtcgacggcggctctgcgccgtcgtcgacggcggacagcagcgtcatatcgctcgcctgcaatgctgcgggaccgggaccgggaccgggaccggtaccggtgtccgctgctgcggcgacgggagcggacgctgccgtgatgtgatcattcgtctgtgccgccgggcgtgaacaacccagcagcaccagtggtgcgatcaggaacaggatcctgcgcatgcccgcctcctccccgaggcaacctggagggcggcagtgtatcggttgcgccgctatcagcgggaggagggcagctgctccagcgcgtccagcgccggcaggacctggccggcgatggcggccagtgcgtggccgtcggtctcggcgtggcgttgcacgatgtcgcgcagcagctgggtggcgatcaccagggtcgcgcgctcgtcgccactgatgccggcggtacgcggggccgcttccagcaggcgcatcaggtcgcggccggcgcggtgttccagttcgatggtgcagcgcccggtgcactgcagcccgtccttttcgatcggggttaccgagatccggtagcgggtggaggggctggccatgagggtgtgctcgccgtagctgtggaggatgtgcccaccataggcaaggccacggctggcggcgacggccggcgctgcacgcagtgttccacccggtacgttccgcgccctttgcggagcaccggcagccaatgctggcgggcctgtacggggattgccggggccgcggcaacgctgtgttgcggggtgtggtgcggacaaaaaaaacgggacggccagagccgtcccgtcggaatccgcgttggggcgcgcgcttacagcgcggcgtccttcagcttcttcagcggacgcaccttcagcttggtggtggccggcttggcagcgaaccactgctcttccttggtgaacgggttgatgcccttgcgcttcggcttggccggcacattgacggtggtgatcttcagcaggcccggcagggtgaacgagccagcgcccttcttgtgcaccgaggaggcgacggcgctttccagcgaggccagcacagcgcggacgtccttggcgatgacgccggaggcttcagcgatgtgtgcaaccaggccggacttggtcagcacttccttgatcggcttcggagcggccggcttggcggctgccttcgtcgcgactttcttcactgccttcttcggggcagccttcttagcggtctttgccatggtttcctgttccgtgaacggttggttgtgtggtcggcgccgaaccccgtcggcaagcgcaatgtagggcaactctcgggcgccgccaatagcccgaagcgcggaaagtgcatgttttttcatatccaggccgattcagtacatggccggcggtggggggcgggggcgctgcagcgtgcgcgatggctgctgcctgcccgttgctggaatgtgcgaaaccactgaaaacaagggaaaagtccgcgtcggtctggcgaagaagtgaccagctgtccgatgtccggcggacgtgcggcatgcggcggagcgacgcagggctaacgcgtcccgtgcgagagtggccgttcatcaccgccacgcaggagcagcacatgggaatctcgcgacacgccaccgcgcactgggaaggcgatctgaagtcgggcaagggacagctgagcacgccgcagagcgggctgctggacaagacccgctacggtttcaacagccgcttcggcgacgagaagggcaccaatccggaggagctgatcgccgccgcgcacgccggctgtttcaccatggcgctgtcggccaagcttggtgaggccggcttcaccccgacctcgctggacaccgaggccaaggtcgatctgtccctggagggcgggccgcagctgtcgcagatccggttgaaggtgaaggccgtggtgccgggtatcgacgccgcacagttccgtgccattgccgatgacgccaagcagaactgcccggtgtccaaggcgctgagcgcggtgccgatcagcctggaagccgaactgggctgagccacggtagtgccggccgcgggccggcaaccgcatgatgccggggtccatgtagcagccggccagcgttatggcggccttcctggccgccaccctccgggccgtcgcgtccgacgttggcagcggctcctgccgctgccttcggctctaccacccgccagcgcgatcaccaatcaagggtgccggtaatcaccgtctgcacctgcccgcccgaccagacctcgccgtcttcatcgacgcgcagggtcaggcgcgcgtcgtggccgacttcgcggccctggctgacttcgaacgattcacggccccgcggcagcgcatcgcgcaggtccagccacgcggccagcacggcattagccgcgccggaggcggcgtcctcgaagcggcgtccattgccgacgaaggcacgtactgcaagatcgaagccctcgctgccatcgctgaaggcgtaggcaaacacgcccatgctgtcggtggattcggccagagccgcgaccgcgtcccagtccgggcgcagtgcgcgcagtgccgcttcatcggccacctgcaccacccaccagctgcgcccgccctgcatgcgcgccggcggcagcgagcccagcggccaatccttcagcgccgcctgcaggcgcgggtcggtggcctcggcgatctccgccagctgcgcgcgcggggtgcggatggcaatgcgctgctgcgcgccctcgccgctcacgcgcagcggcagcgcaccggcgatgccgtcctgcacgagcacgccgtcgactggcgcggccaggcccgcctgcagcaccgcatgcgcggtgccgacgctgggatggccggcgaacggaacctccttctgcgggctgaacatgcgcagccggtagctggcgcctgcgacctgcggcgggaacacgaaggtggtctcgggcaggcgcgtccagcgcgcaatggcctgcatgctggcatcgtccaggccttcggcatcaagcaccacggccagcggattgccggcaccggcgcgcggggagaacacatccagctgcaggaaacggcgggtggacatcaggcaggactccagtaaacaggcggcatagcgtagcgcggggcacaaaaaaggggacggagggaattaagtcgcttgtgccccaagtgccataagcgacttaattccctccgtccccttttttcgtgcgctaccagcgaaggtggccgtcgatgaccggctgcacctggccgccgatccagaccgtgccctgcgcgtcgacctgcacctgcacgtggccatcgcggccgacttcgcggccctggctggccacgtagtggccctcgcggccgggcagggcgttgcgctgccgcagccaggcagcgatcagggcattggcgctgccggtgaccggatcttccggcacgctggccgcatcggcggggcagaatgcgcgcaccacacgggtgtggtcggtaccggcttcgtcggcgaatacggccacgccggtggcctcggtggcaaggctccagtcgcgcagggcggccatgtccggcgccaggccgcgcacagcggcggcatcgcgcagcggcagcagccaccagcgcgcgccgttgtcccagagttcgggcacgtgcccgttggcggcgagggccagcagtgtttcgggtgccgcatctgcgccagtcgccagttgccgcgccggtgggctggccagctggatctggagtgcctcggccgggccgctcacccgcacgggcagcacccccgccgcgcactgctgcagcagggcgccgtcgcgaggctgggccaggccgcagctcaccgccgcccaggccgcgccgacgctcgggtggccggcgaacgccagctctcgggtcggggtgaagatgcggatgtggtagtcggcgccgggcgcgctggggcgcaggaagaacaccgtctcggacaggttcagccaggcagccagggcctgcatctgctcgccggagagcgcatcggcgtccagcagggcacccagtggattcccggttccggggcgggaggcgaagacatcgagctgcaggtaacggaggagggccatctacggggatattgcgcttagaatcaaaggttccgcccccgagggcggcttccccacattctacatagccaatccatgtcagcttccccccttgtcgatcgttggatcgtactgaagttcggcggcacctcggtgtcgcgtcgtcaccgctgggacacgatcgggaagctggcgaaaaaacgcgcggaagagaccggctcgcgcgtgctggtggtggtgtcggcgctgtccggggtcaccaacgaactgaccgcgatcgccgatggcgcgccggacagccgtgatcgcgtggccgcgctggtcgaacgccatgaaggcttcctggccgaactgggcctgggccgcgaagtactggccgagcgcctggcggcactgcagggcctgctcgacgacccgcgtgcggccacccgtccgctgcagtggcaggccgaagtgctgggccagggcgaactgttgtcgtccacgctgggcgcggcctacctgcacgcctcgggcctggacatgggctggatggatgcccgccagtggctggacgcgatgccgccgcagccgaaccagagcgactggtcacagcgcctgtcggtgaactgccagtggcgtgccgacgcggagtggatgcagcgcttccgcgcgcagccgacccgcctgctgatcacccagggtttcatctcgcggcatgccgatggcggtaccgccatcctcggccgtggtggctcggatacctcggcggcgtacttcggcgcgctgctcggcgccagccgcgtggaaatctggaccgatgtgccgggcatgttcagtgccaacccgaaggatgtgccggacgcgcgcctgctgacccgcctggactactacgaggcgcaggaaattgccaccactggtgccaaggtgctgcatccgcgctcgatcaagccgtgccgcgatgcaggcgtgccgatggccatcctcgataccgagcgtccggaactgccgggcaccagcattgacggcagtgctgcaccggtaccaggcgtcaaggcgatcagccgccgcaacggcatcgtgctggtgtcgatggaaggcatcggcatgtggcagcaggtcggcttcctggccgatgtgttcaacctgttcaagaagcatggcctgtcggtggacctgatcggttcggccgagaccaacgtcaccgtgtcgctggacccgtccgagaacctggtcaacaccgatgtgctggccgcgctgtcggccgacctgtcgcagatctgcaaggtgaaggtgatcgtgccgtgcgcggcgatcaccctggtcggccgtggcatgcgttctctgctgcacaagctgtcggacgtgtgggccaccttcggccgcgagcgcgtgcacatgatttcgcagtcgtccaacgacctgaacctgaccttcgtcatcgacgaggccgatgccgatggcctgctgccgatcctgcatgccgagctgatcgacagcggtgcgatgccggtggaagaaaccgaagtgttcggcccgcgctggcgcgagattgccggcaccgtgcgcccgcgcggcacgccgtggtggcgcggccagcgtgcgcacctgctgcagctggccgatgccggtacgccgcgctatgtctaccacctgccgacggtgcgcgcccgcgcccgcgcgctggccgcgatcaagccgatcgaccagcgttactacgcgatcaaggccaacagccacccggccatcctgcagctgctggaagccgagggcttcgggctggagtgcgtctcgtacggcgagctgaagcatgtgttccagcacctgccggagctgtcgccgcggcgcgtgctgttcactcccagcttctgcccgcgcagcgagtacgaggcggcgttcgcccttggcgtgaccgtcaccgtcgacaacgtcgaagcgctgcagcgctggccggacctgttccgcagccgcgagctgtggctgcgcgtcgacctggggcgtggcgaaggccaccatgccaaggtccgcaccggcggcaaggagtccaagttcggcctgccgatcgcccgcgtggacgagttcgtgcgcgcggccaccgagctgggcagccgcgtggtcggcttgcatgcgcacctgggcagtggcgtggaaaccgcgcagcactggcgcctgatgtgcgatgagctggccggcttcgcccgccgcatcggcagcgtgcacaccatcgacatcggtggcggcctgccgattccgtacagcgacgaagacgagccgttcgacctggacgcttgggccgagggcctggccgaggtcaaggcgctgcacccggcattccgcctggcgatcgagccgggccgctacctggtggccgaatcgggcgtgctgctgacccatgccacccaggtggtggaaaaggacggcgtgcgccgcgtgggcctggatgccggcatgaacacgctgatgcgcccggcgctgtacgacgcctggcacgacatcgagaacctcagccgccagggtggttatgccgaagcggcgttcgatgtggtcggcccgatctgcgaatccagcgatgtgttcggcaagcgccgcaagctgccggtgtcgaccgcgccggacgacgtgatgctgatcgccgacgccggcgcgtacggctatgtgatggccaacacctacaaccagcggatgctgccgcgcgaagacgtgatcgaatgaccaccgcgcgcgccctgcacccgcccaccgacacgccccgcgccatcgcgcgggcccgtgcctgaccggatacaccatgactgctttcgacaaacaccaggtttcccgcttccgcttcgtccgctgcgaattcgccgcggataccggcgtggccaggctggtctacgccttcgatgacggcccggagatggtggaaaccatcaccgtgcccggcgccccgttcgtgctggacgaagcgcgtagcgccgccgtgcagcgcgcgctgcagctgctgcacctgatcgccggtgtcagctactacaaggccggcgtaccggatacggtcagcatcgacagctacagcatcgatgccgataccgccgcgctggtggagaccatttacctcaacggcctgggcgaattcgcctaccgcaacggcctgaacctgcgcggccgcttccggttgccggtgcagggcgtagctgcgcaggcgccggcgctgggcctgcagccgcacgcgctggtggccatcggcggcggcaaggattcgctggtcagcatcgaagcgctgcgccgtgccggcgtggacgagaccgtgacctggatcggtggctcgcagctgatccgtgcgtgcgccgagcgcactggcctgccgaccttgaacctgggccgcacgctggcaccggaactgttcgagttgaaccgccagggcgcctggaacggccatatcccggtgacggtggtgaactcggcgatcatggtgctggccgcgttgctgcacggcgtggaccaggtcgtgttctccaacgagcgctcggccagctacggcagccagattccaggcaccggcgaagtgaaccaccagtggtccaaggggtgggcctgcgagcaggccttcggtagccatgtgcagaagtacgtggcggcggacctgcagtactactcgctgctgcgcccgatgtccgagctggcggtggcccgccagttcgccaagagtgacttctacgacgcgcatttctccagttgcaaccgcaacttccacatcctcggcgagcgcccggtgaaccgctggtgcggcgtctgcccgaaatgccatttcgtgttcctggcgctggccccgttcatgcccaagacgcgcctggtgcgcatcttcggccgcaacctgctggacgatgccgagcaggccggtggcttcgatgcgctgctggaattccaggaccacaagccgttcgagtgcgtgggcgaaggccgcgaatcgcgtgcggcgatggcgaccctggcacagcgcccggagtggaaggaagacgtgctggtgaagcgcttctgcaacgagatccagccgcagctggatgccgccgaactggaactggcaccgctgctgcagctgcagggcgagcatcgtgttccagctgcgctgtgggaacgggtgcgtgaagatttcgaagcttgaaggaaagcgcgtcgcgctgtggggctggggccgtgagggccgcgccgcgtttgcggtgctgcgcgcgcgcctgcccacgctggcattgagcctgttctgcccggtgtccgaggtcgaggcggcgcgtgcggaaacggagggcgcgctggacgtgcgtggcgagccttccgctgaagcgctggccgcgttcgacgtggtgatcaaatcgcccggcatcagcccctaccagccgatcgcgctggcggctgcagggcagggcaccagcttcattggtggcaccgcgttgtggttcgccgaacacgcggccgacgatggcatcgtgcacgacaccgtgtgcgtgaccggtaccaagggcaagagcaccaccaccgcgctggttgcgcacctgctgcgtgccgccggccatcgcaccggcctggtcggcaacatcggcctgcccctgctggaagtgctggatccgcagcccgcgccggagtactgggcggtggaactgtccagctaccagaccggtgaggtggcacgcagtggcgcccgcccgcaggtggcggtggtgctgaacctgttcccggaacacctggactggcacggcagcgaacagcgttacatcgaagacaagctgcggctggtgactgaagccgcaccgcgcatcgccgtgcttaatgccgccgatccgcacctggccgcgctgtcgctgcccgacagcgaagtggtctggttcaaccagccgcagggctggcacatgcgcggcgacatcgtgcatcgcggtgagcaggccgtgtttgatacctgcaacacgccgctgccaggccgccacaaccgcggcaacctgtgcgcggtgctggccgcgctggaagcgctggggctggatgccgtagcgctggcaccggcggtgcaggacttccgtccgctgcccaaccgcctgcagcgcatcggcgtggccgatggcctgacctacgtcaacgattcgatcagcaccacgccgcatgccagcctggccgcgctggagtgcttcgccggccagcgcatcgcgctgctggtgggggggcatgaccgtggcctggactggaccgatttcatgcagcacatggcgcacgatgtgccgccggtggagatcgtgaccatgggcagcaacggcccgcgcatccacgcgatgctgcagccgctggccgacgccggtcgcttcggcctgcatgcggcgggcgatctcgccgaggcgatggccttggcgcgcgccgcgctgggcgaacagggcggggtggtgctgctgtcgccgggtgcaccgagctttggtgcgtaccgcgactacgtggcgcgcggacgtcatttcgccgcgctggccgggttcgatccggacagcatcagcgcgattccggggctgggcatcgggtaaggggtcggatccttttccgcaggaaagggctctgaccccgtcgtgcatttatcatgcaggcatcccggacggacccggatgcccgcatgtgcaccttcatcaccgtgttcctgcccacgtcattgccgcacgacgcggccgccgcggtcttcacccgtagcggccggcgcctgttcgcgcaggcatcaccgagcctgcaggcggcggtgggcccggattggcagccgtggctgagtgccgcgcactgcgattgcggcaccgcgctggcctcgacgagtgtgcagccggaatggaagggcgatgccgaacgttggcggaagaagggctggagtgaggccaggatcgctcgcgcgctgtccgagcagttggcgcggcatgaacaggatcagcaggtgtgccgcgatagagctcttgccgacgccggccaatggctgcagcgcattgatgccctgctgggtgtgggtgcggcgcgtatcggacttctggtgcgtgtttacgacggctcggtgggggcccggcagccgaagccgccggaacatcattggtcgcgggatcagctcgccgcggcggatctgttggcgttcgcgcccggcacgttgcactggatcgaacgcgggtgagagcgccatccacgcatggcgtggatctactgtagagtcgagcccatgctcggctgggtttcaatcctcgtcctggtcgatgaacgcgtaatcgcgatcaatcatttgttgcaggtaggcgtcgaagccgggcgcgatcaccgcgtagctgtccggatcgtgcaggtagcgcaccacctggccgaccgtgccgcccgaccccgggtcgaaatccaggtacagcatcgacgtgccgccgttgttcatgcagtgcgagaagcacaggcggcggttcatcggcagatcggcgtcgatgccctcacccaggatctccggttcgtcatccagccactcttcgtagatcgaacggatgctgtcgtcccactgctgctggtcttcgaagatctgtgcgaccgagcgcaggtagtacggatagtcgccgacatcggagccgagcatcagcacgcacacctcgccgcctggatactcgcggaaatgggtgccatccacgcgcgacaacagttccatcaggctgtcagggacctgtggccactgcgcccgcaggcgctgtaggtcttcgacagtggcaccctgtacccgcgcccattgcggagcatcctcggcgggcaagcgcggaatcaggccagacagaaagcgatcaacaagggtcatcggaagatgccaagagcagggcaggcacagccggcttcgcgcatcgaggccggccgtgcggcgcggcgtgtcagcgtaccacctggaaatcgatgatgtcgtagaccgatgagccgtacttgccatgcgattccagggagatcgcgatgccgaggtcctcgatgaaggcacgaacactgcgatcgccgtcgaccttgcactccagccggatcgcatcgccagaaagcgaggctgatacatcgcgtgccgggaagcgttctccgatcacgcaggacagcgtggtggtgagtggcttggaagtgctgcgttccggatagaagaccatcgtcgtctctgcgcggaaccggctgccgggtgtccacgctgcgggaagatcctgcttcagcgaccgggtctgcagggtcatcgcagcgtcgcgcatggatgccagctggaagagatttgcctttgacagccgatgcatggtgaacgaggtgtagtcctcggtgatcttcaacaggccgttgtcggccaccatcgtaatggtggtcggagtagtggagggggcccttcccttgatccggtagcggtaggtcagcgatgtgaaccggggggccagcaacgggttgtccacgccatcaacaacagccttgataaccggcacatcttccagccgccggccggccgcctgcggctgcgggcgatcggcagcgggtacgtcggggcggagctgggccatgacatcggcatctaccgccccttgcagcgaacatcccaccatggtcctgccgccgctggattccaccatcagcacccgttccagaagcatgcgtccggaggcaatgccgccacgattggaagtgggcagccactgatcgcctgcgcggacctcgctacgggcatgcattccgcgatcgccctgcaggcgctcggcatgttcgatcaagggcgacagctgcttgacaaccgtgtccagtggcgcatcgaaggtgaacccccagctcatataacgacccaggacgcccaggtccgacgtgttgtcgaagtaggtggcgaccggcaggccgccgatgcggggtccgccacggagctggacctcgttggtggtctcggaacgatccttggtctcgatccagttgatcgtgcctgtcccacccaacgatgcgtgcgcggcccatgcatctgcgtgcgtgtgcaggctggagaagaagctggcgtcgcagcggctgaacgcggtgaaagtctcgtccagcggactggcgctcagctgggcagcaggcagcagaagggcaagcgaggcaagcgaagtggaacccaggtttttcacgaaacgggacatccttgttggggaaggggggggcacacagctggacactagctatcggcctgttcgtctggatctgaagtgggggctgcattgcgtgcttcggcttcacgccggccccgtacactccgggttccctctcggtggagcaggcgcatgaatcgttggcgatgcggtgtggcggtgatcctggggctggcggcgatgccggcgtgggcggcgatgaagacccagccggtggaatggaaacaccagggcacgaccttcagtggcgtgctggtctatgacgatggcgacaacgacaagcgcccgggtctggtgatggtgccgaactggaagggcgtgaacgaatcggcggtcgaaaaggccaagcagctggccggcgatgactacgtggtgctggtggccgatgtgtacggcaagggtgtgcggccgaagaccgatgccgaggccgggccggtggcaaccaagctgcgcaatgacaggccgctgctgcgcgcacgtgcgctggaggcggtgaacgtgctcagggcgcagtcgggcaaggtgccgctcgatgccggccggatcggcgcggtcggtttctgcttcggcggtaccacggtgctggagctggcccgtgccggtgcgccgctggccggtgtggtcagcctgcacggcgggctgggctcaccgctgccggcgcaggccggtggcagccatccgtcggtgctggtgctcaacggcgccgacgacaggagcgtgaccgccgaggacatcgctggcttccagaaggaaatggacgcggccaaggtcgagtgggaattcaccaactacagcggtgcggtgcactgcttcgccgagcgcgatgccaacagtccgccggggtgccagtacaacgagcgggcggcgaagcgcgcatggaaggcgctggatgagttcttcgaggaacgcttcgagaaacgttgattcgtgcagtggtagtgccggccgctggccggcaacctcatgatgctgcggatgtcatcgggaatgccggccagcggccggcactaccgatgcttcagtgccgaccaacggtcggcacccaccggaatgccggtttggtgggtgccgaccgttggtcggcacacctcagccggtcaatgcgagcgctgcaccgcgtagcgggccaggccgcgcagggcggccacggcatcgttgtcgcccaggccatcgagcgcgcgctcggcggcttcggcatattcctctgcacgcgcgcggctgtactccaggccgccggtggcgcggatcgcggccagcacttccggcatcgccgaggcgtcaccgtcctgcacgatggtgcgcaggcgctcgcgggtggcgttgtcggagtgggccatcgcgtggatcagcggcagcgtggccttgccctcggcgaggtcgtcgcccaggttcttgcccagctcctcggcgttggccgagtagtccagcacgtcgtcggcgatctggaacgcgtagcccaggtgcatgccgtagtcgaacagggcctgctgggtcgcttcatccacgccgctggccagcgcgcccaggcgggtgccggcggcgaacagcaccgcggtcttgcgctcgatcacgcgcaggtaggcggcttcgtcggtgtccgggttgtgtacgtgcagcagctgcagcacttcaccctcggcgatgcggttggtggcgtcagccaggatctgcatcaccggcatgcgctccagctcgaccatcagctggaagctgcgcgagtacaggaagtcgccgaccagcacgctgggcgcgttgccccacagtgcgttggcggtgctgcggccacggcgcaggctggattcgtccaccacgtcgtcgtgcagcagggtggaggtgtggatgaactcgatgatcgccgccagctggtggtgctccgggccagcctggccgaccgcatggccggccagcatcaccagcatcgggcgcaggcgtttgccgccggcggaaatgatgtggtcagcgatctggttgatcagcacgacgtccgaggacagccggcgccggatcagggcgtcgacggcggccatgtcggccgcggcaagcgactggatctggggcaggcccagggcgggacgggtgtcttcggtgatggtcatgcgatcaggctttcaggctcaccaccgattataggcgctggccgtgaattcgggcgcaaaccggcccgagcggcaattccagcccggcctgcgcggccctgcgcgtgaatacgtatgcaggttgcgccatgcctgggagcccgccgctaagcttgccggatcaggatttcggcccgctgccggcgggtcccgcatgcccggaggggggctgtcgatgtcgcactatccatggtggcgcggagccgtcatctaccagatctacccgcgcagttaccttgatgccaacggcgatggcgtgggcgatctgcccggcatcatccagcgcctggaccacattgccgcgctgggcgtggatgcgatctggatctcgccgttcttcaggtcgccgatggccgacttcggctacgacatcgccgattaccgcgatgtcgacccgctgttcggcagcctggacgactttgaccgcctgttggccaaggcccacggcttgggcctgaaggtgatgatcgaccaggtgctgagccacacttcgatcgagcatgcgtggttccgtgagagccgccaggaccgcagcaatccgaaggccgactggtacgtctgggccgacccgcgcgaggatggcaccccgcccaacaactggctgtcgctgttcggcggctgcgcctggcagtgggagccgcgccgtgagcagtactacctgcacaacttcctggtcgaccagccggacctgaacttccatcacccggacgtgcagcaggcgaccctggacaacgtgcgcttctggctcgaccgcggcgtggatggcttccgcctggatgcgatcaacttctgcttccacgacgcacagttgcgcgacaacccggccaagcccgccgacaagcgggtggggcgcggcttcagcccggacaacccgtacgcctaccagtaccactactacaacaacacgcagccggagaacctgccgttcctggagcgcctgcgcgcgctgctggacgactacccgggggcggtcagcctgggcgagatctcttcggaagactcgctggccaccacggccgagtacacccgagatggccgcctgcacatgggctacagcttcgagctgctggtggacgactacagtgcggcctacatccgcgatacggtctcgcgcctggaagcagcgatgaccgaaggctggccgtgctgggcggtgtccaaccacgatgtggagcgcgcggtcagccgctggggcggccaccccgccgacccgcgcctggcgcggatgctggtggcgatgctgtgctcgctgcgcggttcggtctgcctgtaccagggcgaggagctgggcctggccgaggccgaggtgccgttcgaggccctgcaggacccctatggcatcaccttctggccgaatttcaagggccgtgacggctgccgtaccccgctgccgtggaccgatgcaccgctggccggcttcaccaccggccagccctggctgccgatcccggccgaacaccgggccgcggcggtcgccgtgcaggagcgcgacccgcattcggtgctggcggcgttccgcgcgtttctggcctggcggcatacccagccggccctcctgcatggcagcatcagatttcttgaaagcgccgagcccgtgctgctgttcgagcgtatgcttgcagatgaaaccctcctgctggccttcaacctgtcggccgaagcggtgagccatccgctgccgccgggcaactggcagcaggtggtggtaccgggcccggatgcgggcacggtgcagggcaatgaactccagctgccgccacgcgcggtgtattgcgcccgacgcagctgaccgttttctccggtggcggtacttgcggggacggggccgaagcgccccgtcccttttttgtggctgggccttgccgaccagcggccggcatccgcgcaaaggaaaacccgctgcctgcgcagcgggtttccggtcctgctccctgttttctgttgccggccagcggccggcactaccgggtccgggctgccgggcagggcccggcgctgcctcagaacttgtagttcacgcccagcatgtaggtgcggccccattcgatgtactccagcgggcggtccttgctgccggcgtaggtgcggtacggctcgttggtcaggttgctgccctgcagcagcagggtcaggccacgcagggcgctgctgtcgctgaaggtgtagctgacctgcgcatcggtcacgttttcgccgacgacatagcgcaggctgcggttgccgttgaagttgccgatctcaccgatgaagtccgaccgccggcgctggctgacgcgtgcttcaaaaccgctgcgctcgtaataggcagtgaagttgtacacgcgcttggacaggcccggcaggctgatcgggtcactgcccacgctggaggcgctctccggatccaggatggtgatgtcgctcttgttgaaggtcgcgctggcctgcaggccgaagccacgcaggctgtcggtcagcatgtccagcgggaacgatgcggtcagttccaggcccttcaacgtgccgcccttgccgttctgcggcgcggagaaggtgccggtggtcagcaccggcgcggtcatgcccggcggcggcacgtagctgcccagcagcgcggtgaagtcgtagttgtccaccgattgggtatagacgtagctcttcaggtccttgtagaagatcgcggcagccacgtaggccttctcgccgaagtacttctcataggacaggtccagcgcggtggcgcgccacggatccagcagcggattgccaccactgccgcccggccggccggtgccggtatccacgccgaactccaggccggcgcgcatctggtccacgcgcgggcgcgcgacctgcttggcggcggcgaagcgcagcgtctgctggtgggggaacatgaaggccaggttcaagctcggcagccagtcgttgtaagtgcggccgttcgaatacggctgcacgttgttgccggctgactgcgagctgtcccagtagcgcgaatccgagctctggtcggtgtgctgcatctgcacgccgatgttgccgcgcacgcccacttcaccgatgtcggtgttgatgttcaggcgcgcccaggcggtggtgatcttctcttcgaccgtccacgacttggggatcaggtagtccaggttgtcgaccgggttgaaggtcatgtaacgacccacagcggccggtacgttccaggccgggatggtgccgaggccggcgaagcccaggtccaccggacggtactgcaggtccgaggcgatgttggcatcgccctgtgcgccgagcaggatgttgccttcggactgggtcttcaccttgcggcggtcggcatagttcacgccgatgtcgatgtccggcgcccacgaggcgatggtatcaggaagggcgatggtggcagccagcttgccgcccttcaggcggtcttccacctgcggcaccttgccgtagccggagccgtagatcgtgttggtcaggaacagcgcatcggggttggagtagttcaggcccggggtgatctgcgagaagccgtcctggcggatcgacacgccgaccgtatccagttgcggcatcggggtcagctgcaggttgttttccaggttcagctcgtcgcgcgtggccttggagtagttcaggtcggcgaccagcttgatgccgccgaagttgaactcgttgttccagccgaacgcatcgatcttgtccttgcgcttgttgtacatgccgcgcaccagcggatacacgccgctggcggtgccgccggtgaacgagccgttggcgttgacctgcgggttgctgaccagcaggcccggggtgtagttgccgttgtagttgctgaggttcagctcgaactggttggcggtgtcgatctgctcggcttcggtgtggaaggcatcgaaggtgctggtccagctgttgttcgggcggaactggatcgtggccatcacgccgtcgcgcttgttgttgccggtgcggcgcagcgccttgatgccatcggagaagtaggtgccggcacccacgcccgggcggtcgcccttgtcggtgtgctcggtggtccacggctcgtacaggccgacctggttctcctggatcggcatgtcgctgtgcgcatagccgatggcgatgcccagggtcttgtccaggaactggtcgatgtagctggcgctgaagcggttgccgtacggatcggtgttggcggcgcggcccagcgagctcttctggtagcggccactgaccgcgatcacgcgctcgccgaagctaagcgggcgcgcggtctgcatgtcgatggtgcctgacaggccctggccgaccagcgccgcgtccggggtcttgtacaccgtcacgccgttgaccagctcggacgggtactggtcgaactcgacgccgcggttgtcgccggtgctgaccacttcgcgaccattgagcagggtggtggcgaagtccggcgacaggccgcgcacgctgatcacctgcgcacggccggccacgcgctgggcggccaggccgggcaggcgcgagatggattcggcgatgctgacgtcgggcagcttgccgatgtcttcagcggagattgcctcgaccaccgaggtggcgtcctgcttgaccgcgatcgcgctctcgatgccgcggcggatgccggtgacctgcaccgtatccaggttggtggcggcggtgccggccggcgtggtggtgttctgcgtggactgtgccgacgccagcgtcggcgccaggacaacggccagcgcgatgctcagcgcgctgcgcttgtggttcaacattttcccctcccaggcaatgttgcagatcgatttgtgagcgttccggcggggccgtgaacgtgcgacgcggtggccgctgtcgtcgccgctatggtaggcagcgcgttcttcgcgggaatcaccctgcatacgtattcaatggcgtctgcagggttgtaatcgctttcaggtgccttgttcggtagagccgggcccatgctcggctgcgtttcggtgctacgcaccgccgcccgagcatgggctcgggcgctacgggagcgcaggtaggaaaacgttcagtggatgggcgtgaagcgaatggcctgcccaccgcccggtgccagcaccagcgtcagtgcatcggcactggtcacctcgcgggttccgcgtgcgaacgcgaacgggttgctgcggaaatcagcgccttcaccatcgcggtagatctcggcgcgatagcgcacgcctggctccaggaagcccagcggtaccggcagcacgcggccgtgttcgtcggtgatgctgccgaggaaccagtcgcggctgttgcggtcgcggcgcacgatcgtcacgtagtcacccacttcgccatcgagcacgcggctctgctcccagtccaccgccacgtcctcgatgaaacggaacgtctcgcgatgctgcaggtagtgttcgggcaggtccgcggccatctggatcgggctgtacagcaccacgtacagggcaagctggcgggccagcgtgctgggaatggcctggccgtggcggcccttcaggctgaggatgccgggggtgtaatccattggcccggccagcatgcgggtaaacaccaggttgacctcatgctccggcgggttcggtggctggccccaggcgttgtactccatgccgcgcgcgccttcgcgtgagatccagttgggataggtgcggcgcaggccggtatcctttatcggctcatgcgggttgaccgacaggtgccggcgcgcggcttcctgcaccaccttcaggtggtggcgggccatgaactgcccgtcgtgccactcgcgccacagtgggcccccggccggattgcggcggtcgacctggccgtcgtcgcagacgtagccggtcttgaactggtccacgcccagccgtgcatacaggtccagcgcggcacccagctggtcctcgtagtgctcgatggcgcagccggtttcatgatggccgatcaggtgcacgcccttcttcaggccatacgccgtcagcgcttcgatatcgaaatcgggcgtggcacgggtgaaatcgaagtcgtagccattgcccacccagttgccgtcccagcccgggttccagccttccaccagcacgccacggaagccatgcgcggcggcgaagtcgatcaccttcctggtcttggcggtggtggccgcgtgcttcggtccggttgcccagctctcgttgtccaggtgcatcgaccaccacacgcccaggtacttggccggcttcacccagctcacatcgcccagcgcgttgggttcattgaggttgaggatcaggtccgattcgaccaggccaccggcacgatcggcgatctgcagcgtgcgccacggcgtggcgaagggcggggtgcggcgtaccttccagccttcggcagagggcgacagctgcgcgcgcaggcgctgcccctcggtgcgccgcagccacatgccggcatagtccaccagcgcggcctcgtggatcgccacgtgcaggccatcgcggctgcgcagggtcatcggcgtatgcaccagcggcacttcgcgcagcggcgtgcgctgatacaggtattcgtagtggatcggttcgccggcgggaatccaccaggcggttgattcgggcgcgatggcgaattcggtcagttcgtcatcgatgatggcttcgcgcaggttcggttgctcagggaacacatagcggaagccaaggccatcatcgtagacgcggaacaccacatccagccgccgcttgcggccggtggtttcagtcagctgcacggtcagctcgttgaagcggtcgcgggtgagccggcgctcgccccacggctgctcccaggtgtcatcgacgctgcgccgctgctggccaagcagggcgaaatcgccgtccaggcgaccgtcgcgcagggcaaagccaagcttcgaatcctccaccacggtgtcgcccaggcgctcgacacggtagcgggcggtgccgccgtccagcagcagactgaccttcaataccttgcccggcgattcgacgctggccacctgcggcgtggcctgtaccagcgtggaccacccgatcagggccagcccaagcatgtgcgcgaacaccgcgcgtacagcagtggatgacatcggcaattcccctcccaaggcgccgttggcagacccggaccataagccagcgcggcgggcgcgccaccgcgcgatgccatgaatacgtatgcaactggacgcagccgacagccccgcgtctaccatggggcccaggcaccttgagggaggggccgcgcccgcccgccggcaacgacggtgcggacctacaacgcgtgcagagagggagggaggccgacgggcgcaagccggtccgccgcttcgatgctgaagatcatttgcctgaccgctgccctgggggcagcgctgggatcgaccgcgcaggcggccgacctgcaattcgacggtcgccatgcgcgcgccgaagccgctgccaagggcagcttcgtgctgcatgcgccgaagggcgcagtgcagatcgcagccgcaccgatgcgcagccagaccggcagcgtgatgttcgatgccctgttcgcgctcgcccagcaggagatgtcccaggaccgcgtggacgcgatccgtgatccggcgttcgacgagggccggccggtaccgtgcgagtgcttccagaccggtgcacgctggccctatgtgtggacccgtgatgtcagcttcgccgccgacctggcgctggcgcggctggacccgcagcgcacccggcagtcgctgcagttcaagctgtcggcagcccgtgacgggcgtacgcccggcctgttcgtggcgcaggacaccggttccggcggcagctggccgatcagcagtgatcgcgtggtgtggttcctggcggcacgccatctgctggaggaccgagcgtttgccgatcaggtctggcaggcgctgcagggcacgctggcgcaggaccgcgcgatggtgttcgacgcgcagatgggtctgtaccgcggcgagacctccttcctggactggcgcgagcagacctatccagactggacccgcgaggacgtgcgtttcatcggtgattcctacgcactgtccaccaacgtgctgcactaccaggcactgcgcctggccgaacgcctggccgggcagcacggcgatgcccgcgcgaccgactacagggcctgggccgatgcgttggcgcagcagatcgatgcgcgcttctggcgcgaggatatcggccagtacatgagctacatcggcgaggccgcgcacccggtgccgtacgccaaggtcgatctgctcggcctgtcgctgggcatcctggccgaggtgctgccgcccgagcgcgcgcggcgtgcgctggcggcgtatccgatgggcccggccggcagcccggtggtgtggccgcaggaggcgcagcagccgatctaccacaaccgcgcgatctggccgttcgtcagtgcctattcgctgcgcgcggcgcgccagctggacgatgcaccgcgcatcgccgccgagatccgctcgctgatgcagggcgccgcgctggccggttccaacatggagaactacgagctggtcagccaggcggtgcatgttgacgagggcgtgctgagcggcccggtggtcaactccgaacgccagctgtggtcggtggccggctatctgtcgatggtggtcgagggcgtgttcggcgtgcaggacgatggccgcgtgcagcccaagctgccggccgtgctggtgcccgaactgttcggcaatcagcgccgcatctccctggaggccgatggcaggcgttatgtgctggagcgaccgaagcaggtgggtgatggcctgctggtggcgggcaaggtgaagacccgtggcgccaccaccaccgtgcagctggtgcccgccgcagccgcgccacgcagcgcggcgacgacggccgacgcagatgcgcgcgcaccggccacgccggccgcaccgcaggtgcaacgcaagggcaggggctggaatgtcgtggtcgctgccggccaggtgctgtggcaggacggccgggcgctcgccgccagcaatggtctggcacgcatcggtgacgatggcctgcagcattgcctcagcctgacccggcgcgacggtgcaattgaatcgctgcacagcccgatggtctgcgtcggtccgcagcagcgactgaagggtacgcagcgctggcagttcacctccgccagggccgggcaggtgcgcctgcgcctgcagtaccgcaatccgaacgggccgatcaacaccggcgtcaccgctgcggtgaagcagctggtgctgcagtgcccgggccagccgttgcagcggcacaccgtcaccctgccgcacagcgtggccgtgcaggactcgacctcggcgacattcacggtgcccaagggccgatgcacggtcacgcttgaagaaggcttcaacatgagcgcgctgcagcacttcgcgcactacaccgggggcaagggcggacgcgatggcgtgctcaaccaggcccaggtgcaggcgctgatggtggcgccggtggccgcggcagagggcgcacgatgaatcgtaccgccaagccgcagctgtcgttctggcagatctggaacatgtgtttcggcttcctgggcatccagttcggcttcgccctgcagaacgccaatgccagccgcatcttcgagacgctgggcgcggacatcgacgcggtgcccgggctgtggatcgccgcgccgctgaccggcctgctggtgcagccggtgatcggttacctgtccgaccgcacctggacgcgctgggggcgccgccgtccttatttcatgatcggagcggtgctgaccacgctggcgctgctggtgatgccgaactcgccgacgctgtggatcgccgccggcacgctgtgggtactcgatgcctcgatcaacgtgtcgatggagccgttccgcgccttcgtcggtgaccagctggcgccgcgccagcgtccggccggttatgccatgcagagcttcttcatcggcgtgggcgccatcgtcgccagcttcctgccgttcatcctggcccacttcggggtcgccaatacggctgccgcaggtgaggtgcctgataccgtgcgctatgcgttctactttggcgcggtggtgctgttggcggcaatcacctggacggtggtcagcacccgcgagtactcaccggcggagctggccggtttcgatgacgccgaacctccggcacgtcacgcagcagcgccgatcagcggcccggcgccctgggtgcaggtggccgcatggctggggctgggcgtactgctggcgctgctgatcacctggcggcagggcgaccggatgctgtacgtgctggccggcctgtgtgccggctatggcctgctgctggcgctcgcgcgtacgctgccggccacgcacatgctggccgccatcgtcggcgacctgcgcgcgatgccggtcaccatgcgtcgcctggcgtgggtacagttcttctcgtggttcgcgctgtttgcgatgtggatctacaccaccgccgcggtggctggcgcccatttcggttcgactgaaccagagtcggcggcctacaacgagggcgccaactgggtgggcgtgctgtttggcgcctacaacgggttcgccgcgttggcggcggtgctgattccactcatggtgcgtgcgatcggcctgcgctggagccacctggtcaacctgtggctgggcggtgccggcctggtctcgctgatgttcatccgcgacccgcactggctgctgctgtcgatggtcggcgtcggttttgcctgggcgtccatcctctcgctgccgtatgcactgctgtccgacagcgtgccggcatcgaagatgggcgtgtacatgggcatcttcaatttcttcatcgtgatcccgcagctggtggcggccagtgcactcggcttcgccctgcgcacgttgctgggcggccagccgatgcatgtgctggtgctgggcggctgcagcctgttcattgccggcctgtgcgtgttgtgggttccgtcccgtccggaggtggtgtgatgcgtgctgcgttgtctgttgctgtttccttgatgctgctggccggccatgcggcggccgcgccgcgcccggactatgtgggcaccaccgaaccgttcgccagcgatgcggtgtacttcgtggtcaccgaccgcttcgtcaacggtgatccgtccaacgatcaccgtgaccaggggggcgtgcaccgcaccttcgatatcccggtgccctgcccggacaaggtggacggcaacatcggctatctcggcggcgacttccgcggcgtgctcgacaatgcgcagtacatccgcaacctcggcttcggcgcggtgtggatcacgcccatcgtcgacaatccggacgaggccttcaccggcagcaagccgatcagctgcaccagcacgctgaccgaccgcggcaagaccggttatcacggctactggggcatcaacttctacagacttgatgagcacctgccgagcaaggacctggacttcgccgggttgaccaagggcctgcacggtgccggcttgaaggtggtgctggacatcgtaggcaaccacggttcgccggcctggaccatgccgacacggcagccgcagttcgggcagatcttcgacaaggacggaaaactgatcgccgaccaccagaacctgccgccgcaggaactggatccgaagcacaacccgctgcacgcgttctacaacagcgttggaccggtcgacagcaaggacggctcgatcttcgatggcaacctggccgagctgtccgacttcaaccaggacaatccggcggtgatggactacctggtcggtgcttacctgcaatgggccgcgcagggagtggatgcgctgcgcatcgacaccatcggctggttgccgcacccgtggtggcatgccttcgtcaagcgcatccgcgccgagcacccgggcatgttcatgttcggcgaagcgttcgattacgatgccgcgcgcattgcagagcacacctggccggccaacgccaacgtcagcgtgctcgacttcccgttgcgcggtgcgctggagcaggcgttcggcaccgccggcaagggctttgaaaccctggccgagccgctgcacctgaggggtgggccgtatgccaacccgtacgagctgatgagcttctacgacaaccacgacatgccgcgcctgcaggccagtgacaacggcttcatcgatgcacacaactggctgttcaccgcgcgcggcattccggtggtctattacggctcggagacgggcttcatgcgtggccgtgccgagcatgccggcaatcgcgcttacttcggccagccgcgtgtggatgctgcgccgaagagtccgatcttcgcgccgctgcagcgtatcgcccggctgcgcgcagccactccggcgctgcagcgcggcctgcaggtgaacgagcgcctgcagggtgatgaggcggtgttcttccgcgtgctgcagcatggcgagatggcgcagaccgcgctggtgctgctgaacaagggcgacagtgcgaagaccttcaccgtggcgcggtacgtccaggcgggccgctggcgtgatgcgctggacggcggttcgttgcaggtggatgcttccctgaaggccgaagtgccggcgcacggggtgaaggtgtacgtgctcgatgccgccgtgcagcagccggcgctgcaggccgagctggacaaggcgatggccgaccagcgggcgcgggacgtgcgtctggggcgttgatgggcctgggccgggcggctgtagtgccgagccaatgctcggccgcgcttctacggaacgcagataggggcagccgagcgtcggctcggctctacaataggcctcctacctccccgccgtatcgccatgaccgacctcgccccgcagaccccgatcgaaaccctgctgaaggcggcgatggacgggtcggtgccgatccgcgccttcatggaggccttcgtcgcctcccaggtggtactgctgaccggcagcctggtgacccccgatggcagcggcttcgacccgctgctgttcgacaagcagggcaccctgcacgtggccgtgttcaccgatccgtcgcgggtgggcatctacagccagcaggccgaacaccagatccgctggcggatgctggacgtgctgcgccgcgtgccgggtggctacggcgtggtgatcaacccgggcacttcgctgggcttcgagatctcgcccagcggcgtcggcgagatcctgaaggacttcgcccagggttgattgtcatgtagagccaagcccatgctcggctgccgttcgcgcaatgccggatcagtcgagcacggctcgatactacagagagcttccctactacagagagcttcccttcgggcaccgtacgtgatcccctttggactacatcgggatcgaggcactctccatggaattcagcgaatcacccgccgacgcaccggcacgatcacgccattcccgctccgcactggtcttcctgatcacggccatcgtcgccgcactggtgtccatgcctgttctgcgtgcggtgggcatggtgctgtggccggtgttcgccattgcctggctgatcaacctgggggcggcctggcatctgggccagtgggcgcgccagcagggccgtccggcgtgggcattcgggttgccggcggtgcttggcaccgtcgcctcgatcgtggtcttcgtgctgctggcgttgctggggccgaaggccccggtgcgctgaactttcgcggttgtcgtggacggtgtgcggggcagggctcggcactacagcaaggccaagccaagcccgcacgcgtcgcgcggagcaccggcacatcggccggcgccccgttgcttcacatcgtcaccttgcgccggttgtcatcgctcacccggtcgatcagcttgttgtagggatcgaagcctgcttcgtccggcttttcatccaccgtcaccgtgatcttcggcgcggcgctggtgatgtggtggcgctgcaggtacagcaccttctggtcgcgctccttgcccgacggtccggtggcgaacacgccgatctcgacccagtcatccatcttcgcgtcgctctccctgcccttgccatcggcgtactgcttggcggcatgcaggtccagggtcacgtcgtagcggccgtcagcacgtttgcgggcgctggcggccatcacccggttgtcgtagaagctgatcttctcgaacaggtcggtgaccagctgctggcggtcggccggggtctcggcgcggatgtagcccagcagctcgcgtgaggtggtgtacggcggctgctggtagcccttgtcctgcaggaagcgcttcaacgcacggttcagcgcctgctcgccgatttcctcgcgcaggcggtagaacaccagcgaacccttctggtagtggatgtactgctggttttccacgcgttccagcggctgttcctcgatggcttcgccaccgcggccggacaggtagccgtccagttcgcgcttgaggaactggcgcatgtgctggcggccgtattcctgctccataaccatcaaggccgagtactgcgacagcgattcggacagcacggtcgcaccctgcacgttggcgccgatcacctggtgcgcccaccactggtgcgcgatctcgtgcgcggtcacgtagaacacgtagtccaccttgtccgggtcgcgcaggtcggcgatgaaaccgatggcctcggaataggggatggtgttggcgaaggactgcgcgaagcgggcatagcccgggaattcgatgatgcgtacctggcggtgctggtacggggtgaagttcgcctcgtaataggccagcgacttctgcaccgcctcgatcatccggttcacgttgtagccgtgcgccggatcgaagtagacctcgatcgggatgtccttgtacttcgccttgcgcacctcccagcgtgccgatagataggcatagaagttcagcatcggccggtccatggcgtagctgaagcagcgccggccgttgaccgtggtctcgcgctgcaggtagcccggggccagcgccacctggtctggtgcggtgcagaccgtggtgcggaagtcgagccagtcggcatcgttggcaatgtacgtgttggcgcgcgccgcttcgtcctccagcctgggcatgcgccgcggctcacccaagccgcgcttgcgccgctcgttgcggtcgctgatctcggcgccctcgttgtagccgaacgagggcagcacgcggctgttgaagaaggtgccgttgtccacgatgttgctcggcgccggcccggcggtgatgccgttgggtttctgcaccacccggaaatgcacgctgcgggtttcgcccggctgcagcggcttctgcaggcggtagatgcggtagccgagatcggcatcgtgcaacgacagcgtctgcccacccaggtcgacgtcgaccagctgcttgtcatcgcccatcgagacatgcacgtcctggatcggcgtggcatgggtattgcgcaccgtccagttcgcatcgatcaccatcgactgcgattccgggaacaggtccacgcggttgtccaccgccacgatgcgcggctgcggctgggtgcggtacttcgacagctcgcgctcgtagcgggcctgcaggtccagctgctggtcgggcgagatgaactcgttgcggatattggtgctccagtacagccagctgcccacgccggcgaaggccaatgccgcaagtccggcgaagacgccggtcgggccgcgcaggcggcggccggccaggaccaggcgctggcgcaggccctggctgacaccgcgcacccagagcgccgatgccaggcacatcagggtcagcaggaacagcgcccagtagccctggaatgccagctgccccggcaggaagtggccgtagccgttcatgtccgaatagggagcgttgggccagccaccgaaggtgtacaggttctgcgtgtagtccagcatgccgagcacgccctggccgatcatcaccacgatcagcagcgcgtaaccgacgaacttgttgttggtgagcacctgcagcaccagtgccaggccccccatcaggatgtagatcaccgaatccagcgccaggctgcgcaggtacagcagcggctccaggtgggtgtagcccttgaccagctgcacgcccatcgccgccagtgcaccggcggcctggaagcagatgatcactgccagcagtgcggtgaacttggccagcagcggtacccagttcggcaccggcatggcatcggtcacttcgttgatgcgcgcgctgcgttccttccacaccagctcaccggcgaagaacagcacgatgatcaccagcagccagctgaaggccccctgcaggcccatgatcatctgcgaggtgaccggccagatcgaggtgccgtacagggtctgccggaacagcgcgttgggcaggaaattggccaggcccagcaccagcagcacgatgaacggcacgctgcgcaggacgccgcgcgtgtcgaagcgcacctggcgcaggaactgttgccacgcggtggtcgcgctgaatgccggtaccacgcgcggcaacgggttgcggttgggccggagggcggcggcgtcggcaaccggctgcgcctgccggcggccccagcgacgacggccgctgccgctgcgctcggtgcggaacagggcgaacgtggcggcgaacagcagcgccgtcacacccagccacagggcacggttggccagcaggtagcccgccaggccgggaacgccgctgttgtgctcggcggtggaccagtagcggatggtgcgtgacagggcgcgcatgcccaaaggctcgctgagcaccgccagccaggtgttgtcgatgtcgcgcagcaccgccgcgctggcgccgaacaggaccaggtaggccaccagcccgatgtagacccacaggattgaacgcgtgaccgctgccagcagtgacagcagcgcggtggtgaacaacaggttgggaatgacgatgaccgcaaaactccaggcatagccctgccagctgatcggccccatgcgctcggcgtccacccagggcatgaacggtgccagccagagcccgaaagcgaccagcaggtagaacagcaggccggtagccagggcggcggcgatgcggccggccaggtaatcgcggcgtttcaccgggctggcgaagatcagctcggcggtgcccagttcgaagtcacgcagcagcgcattgctgacgaacagggcggtgaccagcatgccgagcagggtgaagatgcccagcatctgcgcgatcacggtgggcgcgttgctgtgcacgttgccgctgccaccaccgatctgtacggcgtcgctggacgcagcggcgaaggcgagcagggcgaacagcccggccagcagccacagcagcggggaacgcagctgctcgcgcagctcgaaacggaagaaatcgaggatcatggcgtgctccgctcaggctgccgcgcgagcacgggcctgcaggcgcaggcgctggaagtacacgtcttcgaggtcgggagccacggccgcaaagccgtcgccggggtcgttggcgctgtgcacatggatcaccgggcggccaccgaccagacgggtcgacagcaccacgtagcgcgcttcatggtcggccagctccgaaggatcgacctgcttgcgccagacctggtgctgcagggcgttgatcgcttcgctggggcggccagtcagcagcacctggcccttgttcatgatcgccatcgtcgggcacaggtcggtcacgtcctcgacgatgtgggtggacaggatcaccgctacgttctcgccgatcgccgccagcaggttgaggaagcggttgcgttcctccgggtcgaggccggcggtgggctcgtcgacgatcaccagccgcgggtcgcccagcagcgcctgggcaatgccgaagcgctggcgcatgccgccggagtaggtgcccagcctgcgcttgcgggcatcccacaggttcacctgctgcagtagcccatcgaccacctcgcggcgctgcgcacgctgggtcaggcccttgagtaccgcgaaatgctccagcaggtccagcgcgctgactttcgggtacacgccgaaatcctgcggcaggtagcccagccgacggcgcacggcgtccttgtcgcgcagcacgtcgatcggcgcctcgcccggaatgctgagcgtcaccgtgccgctgtcggcctcctgcagggtggacagcgtgcgcatcagcgaggacttgccggcgccgttcgggccgagcaggccgaacatgccccgcgggatgtccagggtgacgttgttgagggcatgcacgccgttggcgtacgtcttggacagcgaatcgatcttcagcatgcgacgtacacctttccatgggcaatgtctgcgcgttatccgcgcaaccgcctccgtgcgcatccgccgttggtcatggggggagaatcccgccgtcgtgcgttggccagcgcgccggcccagcggcgccttacccgcgcagggatgattcgcgcaccaccagcttcaccgggatgctctggctgtccaccggctgccggccgatcagcgccagcaggcgttccaccagcagctggccggcctgcttggtgtcctgctgcaccgtggtcagcgcgggggataccgaagcggccagcgggatgtcgtcgaagccggtcaccgccacgtcctgcggcacccgcagcccggcctcgcgcagggcgcgcatcgcaccgatggcgatcaggtcgctggccgcgcagatcgcatcgatcggctcgccgcgcgccagcagggcctgacaggcctcctggccggacgcctcggtggtgatcgcatcgtgctgcagcgccggctccgcagccaggccgtggtcctgcagggccgcgacgtggccgcggtagcgctcctggaattcggggtagtggctggaggcatggccgaggaaggcgatgcggcggcagccctgctgcagcaggtgggtggtgatgtcatgcccgccctggaagttgtcgctgccgatcgagacaccgggctggccgggcagggcggcgccccagcgcacgaagtgcgtgccctgttcgaccagccgctgcaggcggtcgcgcgattcgtgatagtcgccgtagccgagcaggatgatgccgtcggccttgttgctgtcctcgtaatcggcctgccagtcggtggacagctgctggaacgagaccagcaggtcctgcccgtgcagggcgcaggcgcgggtgatcgagcccagcatcgaatggaagaacgggttgatcagcgagtcgtcgttggtcgggtcctcgaagaacagcagggccagcgtgccggcattgcgcaggcgcaggctggaggcattcttgtcgaccttgtagttcagctcgcgggcaatgcgcaggatgcgctcacgggtctcggcgttgaccatcgggctgccacgcagggcccgcgacacggtcggctgggagaccccggccaggtgggcgatgtccagggaggtggctttgcctttgatggtcatgtgtgggcggagcgggcatgtgggaggtgcccgggcatgatgccatgcgcagacgcgaatgcccctccgggcgtcggcctgggcgcaggtaagttattgccggacaaggaaatcagcctgatccttcggtgcggtcggggtctcctgaccgggcggaaggcggcggcaatggtaagatgcgtcgttctcgcattcccccaaatttcaccaggggcggctcagcgtactgcaccccgcccggggctgtgctatcactggcggtctgcccctggacaacggacgaaggtacctatggcgcgcggcatcaacaaagtcatcctggtcggcaatctcggcaacgacccggacgtgaagtacacccagggcggcatggcgatcacccgcatcagcctggccaccaccagcgtccgcaaggacaaggatggcaaccagcaggagcgcaccgaatggcaccgcgtggtgttcttcggcaagctcggcgagatcgccggcgagtacctgcgcaagggcagctcggtctacgtcgaaggcagcctgcgctacgacaagtacaccggccaggacggcgtggagaagtactccaccgacatcatcgccgatgaaatgcagatgctgggcggccgcggtgaaggcggcggtggcggtggtggtggcaactacggcggcgatcgtccgcagcgccagcaggcgccgcgccaggagtatggcggcggtggtggtggccagcgtggtggccagggcggtggctatggcaaccaaggcggcaaccagggtggcggttacggcaaccagggtggcaaccagcgcccgcagccgcagcaggcgccgccgatggacgacttcgctgacgacgatattccgttctgattcctacttgacggttttagtgttgatagaggccctcatcgttgtggatgggggcctttttttcgttaggcagaatccagccgtgatctaaccttctacttgcggcagggtgttgatggatgactggcggcacaccatagcgaatcagaatggagagcggcacgggaaagccgtctgcgcgagcccatcgctggtgcatggctttggcgggtcttgatacggcgtgcgaaggacaggcataagcctaacgagctggcgcggggctgttgcacaccgtgtggacatggttaccgcgggcctatgctcgattgcggggcgtctggggtgggaacttggcgcgctgcatgcttgggtgcgttccctatcggtgtcagaagttaatgaagcagagcgatcttgatggatattaatgaaattaccaagacgcttgaggcgggtgacgacaatggcgcgcgttaccaccttttgaatcttgtaaagcgcgaacctgcttgtgacgccgcgtggttgtttcttgttgggattgggtttcggagcgatgatactgagttgtccctgtgggcacttcgtgggcttgagaagcttcgtcctcacgatgtgttggtcgcgtctggattggtggattgcttgcttcggttggagcgatacgaggaagttaaggaggtcattcatgccttctctaaggttgctcgtcctggaatgcccgctcacgacacggtccttgaagagcaccgcaaggcactccagttcatcaacaatagcgttgaggctgcaggtgacgaagacgaatagctgaagcgttcgctaatcgcgaagccttggattgaccgattactttcgctcgacgtcacgagctctacgctttggttaggttgctctccgagccgtgcctggctggcagcattgtcttcgatgagtttctcaagtttttgcgcgagagtgctgttcttgattcgcccccgagcaggagtggagagttaagatgtgtcagtttgcgcgcctttccgacgtttctggtgagtcgatgaaaaccaccgcactgatttcgtgcttcgtcctattcttgcctcgctggtggtgcacaaaagttccgagagcaagtcgctgtgctctcagacgccatatgcttgtgtaggagcagatggtgctgagcttggtctcgccttgatagggggcagcaggagtgctgccgctcctcggcacttggttgagctgtcgcgattccgtatggatggagcgctttccgaggactacaagtgctacctcgccgcgcatggaaattcagtggctcaggctgcgccgaagctggatgccaagaagctggcagggcaatgcatgtccgaatttgctgctttcaaacgtcgggccggcgccgcgaagttcgacgtggcgcccgagaatatctgcaactcagtggcggacatccagcgatccctgcgtgaagctgtccgactagccaatgcaggcggtgaatgtgacggcttctgagtcggtcgtcggaaagagctgatgcgtacgtgattcgcgaagccttggcttggttgactactgtcgctcgacgtcacgagctatgcagctcttcaatccgccggctccgaggcggtgctgggccctggcggcagggtgcacccggatgcatagggccaatgccttggctcggggcatcgaagttctactgactttgctcgctcgcttgaggaaaaagccagtagatttcatctcaggcgacggatctggttagaaaggaaagccccgctaatgcggggcttttctttctgcgcgatgtcgttggcattgtgcttcgcagcatcaattttcgtgcaccgcaacttgcaagcatccagtttcctcccctatggtgcaatcgattgcattgctgtgaatcgttgcgtttgataccggttgggaggccgggaggtggatgtccatccatacgatcagaccggtcccggcaggtgggctgacacgacgtgatgcgcttcgtatcgctgtcgctggaagcgtggccctgggtaccacagtgggcgcgcggactgcattcgccaccactgcaccgctgaagggcaacctgaagcactccgtggcacgctggaccttcccgcagctgtcggtcgcccagctctgcacgacggtgaaggacatcggcttcgccgccatcgacctggtcggcccggaagactggcccacgctgaaggcaaatggtgtctacagctcgatgtgcaatggcgcggagctgggcctgaccaagggctttgccggccgcgaattccacgacccgctggtggagcgctacacgcggcacatcgacctggtcgccgatgccggttaccgcaacctcatctgcttctccggcaaccgcaatggcatggacccccatgacggcatggccaatgccgaagccggcctcaagcgcatcctcgggcatgccgagaagcgcggcgtggtgctggtgatggagctgctgaactccagggtcgatcaccacgactacctgtgcgatcactccgcctggggcgtggagctgtgccagcggctcggctcggacaatttcggtctgctctacgacatctaccacatgcagatcatggagggcgacatcatcgccaccatcggcaagcatcacgcctgcttcaagcattaccacactgcaggcgtgccgggccggaacgagattggagaccagcaggagctccactatccggccatctgtcgcgcgatccgcgacaccggtttcaaggggtatctggcgcaggaattcacgcctgcagcgcccgatcccgttgcctcattgcgcgaggcgatccgcctctgcgacgtctgaaacgatatccacccaggtgagagaccatggcagataatcactacgacgccattgttgttggctcgggaatcagtggcggttgggcagcgaaggagctgaccgagaagggcctgaaggtcctgatgctggaacgcgggcgcaacatcgagcacgtcaaggactacgtcaatgcgatgaaggaagcgtgggacttcccgcatcgcaaccggccgacgcaggcgatgaaggccgccttcccggtgctgatgcgcgactacggcctggccgagaacctggaaggaatgtgggccaacgagcaggactcaccctacatcgaaaccaagcgcttcgactggttccgtggctaccacgtgggcgggcgctcgctgatgtggggccggcagagctatcggttttccgacctggacttcgaagcgaacctcaaggatggcatcgccaccgactggccgatccgctatgccgacatcgcgccgtggtacgaccatgtagagaggttcgccggcatcgccggcacgcgcgaaggactggacgtgctgccggacggcgagttcctgccgccgatcccgttgaacatcgtcgagaaggacgtggccgcgcggatcaagaaggccttcggcggaacgcggcacatgatccactcgcgcaccgccaacatcacccagccgatgccagagcaggggcgcgtgaactgccagtaccgcaacaagtgcatcctgggctgtcccttcggtgcctatttctcgacccaggcggcgacgctgccagcggcgatgaagaccggcaacctgaccttgcggccgttctcgatcgtcaaggaagtgctctacgacaaggatcgcaagcgtgcgcgcggcgtggaggtgatcgatgccgagaccgggcagacctaccagtacaccgccaaggtcatcttcctcaatgcatcgtcgttcaattcgacctggctgctgatcaactcggcgaccgatgtgtgggaggggggactgggttcttcgtcgggcgagctggggcacaacgtgatggaccatcatttcggtgcgggcgcctcgggccgggtcgagggctacgaagacaagtactacttcggccgccgtccgtgcggtttctacattccgcgcttccgcaacgtcgcggccgacaagcgcggctacctgcgcgggttcggttaccagggcggtgccagccgcaccggctggtcgcgcgagatcgccgagctgaacatcggtgccgacctgaaggaggcgctgaccgtaccgggcgactggcgcatcggcatgaccgggttcggtgaaatgctgccgcaccacgacaatacgatccgcctggaccacgaccgcaaggacaaatgggggctgccggtgctggcgatggacgtgtccatgcgcgccaacgaactggcgatgcgcaaggacatggccgccgatgctgccgagatgctggaggcggctggcgtcaaggacgtgaagatgcacgaccacgactatgccccgggcaagggcatccacgagatggggaccgcacgcatgggacgtgaccggaagagctcggtattgaacgcgcacaaccaggtctgggatgcgcccaacgtctatgtgaccgacggtgcctgcatgacctccagcgcctgcgtgaatccttcgctgacctatatggcgctgaccgcgcgcgcggccgaccacgcggtacgcgaactgaaagcggggaacctctgatggatcgccgcgaactgttgaagatgatcgttgccgccaccggcgcggccatggtcggcctgcctgcgctcgcgcagggaaacgccgccgcggcaccggtgaagaccctgttctccgatgccgacatcggcacgctggacgagatcgccgagaccatcctgccgcggacccggacgccaggggcgaaggatgccggcgctggcctgttcatggcgaccttcgtcagcgattgctacaccgcccggcagcaggcaacgttccgggcaggcctggtcgatatcgacaagcgcgccggcggccggtttgtggcgcttgcgccggaggcccgcacccagttgctgcgaacgctggacgccgaagccaaggcgcgctctgccgacgtgaccgagaccggtacgcctgaagagggcgaggcgatgccgcattacttcacgatgatcaagcagctggccatcttcggcttcttcacctccaaggtcggggcgaccggcgtgctgcagtacgtcgcggtgcccggccgctacgacggcgacctcgcctatgtccccggtacgcccgcgtgggggaccagctgatggacaccaccctgatgatccgccctgcgttgatcactgttggcctgctggccgctgcatctgcattcgcgcaggacagtgccgacgctgcgcgcgacccgaagatgaccgaagtgtggacccccgtgcccgctgtcgtggccacgccgccaggcaaggccccctccgacgcgatcgtgctgttcgatggcaaggatgtctccgcgtgggaatcggagcagggcggacgcgtgccctggaaggttgccgggggcgccatgaccgtcgttccgggcagcaagggcatccgcacccggcaacgcttctgcgatgtccagctgcatgtggagtggcgcacgcccactgacacgaagggcttcgacggccagaaccggggcaacagcgggatcttcctgcaggaactgtatgaactgcaggtgctcgacagctacaacaacccgacctatgccaatggccaggcgggctccatctacaagcaggccatgccgcgggtgaatgcctcgcgcgcgccgggccagtggcaggcctacgacatcatctggaaggcaccgcgcttctcggtgggcggtgggcttgtgtcgcccgcgcgcatcacggtgctgcacaacggcgtgctggtgcaggatgacaccgtgctggcaggcaagaccgagtacatcggggcgccctcgtattcgccccatgcgtgtgcgccgctctatctgcaggagcatgactccagggtcagttaccgcaacatctgggtgcgcgagctgtagccgcacacggccggcgtggtcgccggccgcttacttcgccaggtagctggcgatatcgtcgatctcctgctgtgacagctgggagaagggcggcatcaggccgccgcccttgctgatcttttccttgatctgtgcaggtgccatgcgcttgccgatgtcggtgagtgccgggaacgcgcccggcatgcccgcgcgatcggcgccgtggcaggccacgcagttcgcggtgtagagctttgctcccgcagccgggtcgcccttgcaccaggcggctgtcgcaacactcatgccgctcagggccaccgccattgccaggatcattttcatgtggggctccttgatgcgtcagcgccgcgcacgggcaggcgtattggtggtcaggtgttcacgcagatagtcggcgccggcctggacgaccttggccggctcgcgtggctggtcgtgttcgatgatgtaccaatgcacgccggcgaccgccgcggcaggcaggatcgcgttccagtccagtacgccctggccgaccgcagcgaatccgccctcgtcttcggcctggcccttgggcgcattgtccttggcgtgtaccgcgaatacgtggccgcggaactttcccagcatcaccgccgggtccaggcccgcacgcgcgacccaggccaggtccagctcggtctgtaggtcggggccggcggcggcgaacagcagttccagcccggtcctgccatcgaagtcgaccagctcgaagtcgtggttgtgataggccaggcgcatgcccttgccgcgcacctgtttcgcgatccggcccagttcctgtcccagggcggtccagccggcggcatctctcgggcgttccttcctgtccaggtacggcaccaccagcgtggtgttgccgatcgaccggttgaaggtcaccaccccatccaggttgctgcgcagctcggccagcggcacatgcgatgaaatggccttgatcgaataccggtccagcagctgcttcagttccgcggcactgacgttctgcgtgccgacggtttccaccgcgtgcacaccggcatcgtggacgatcttcaactgttgctcgagcgagccggcattgcgcagggtgtacatctgcaccgcgatcggcttctgcgcgctggcggcttcgactgcgaaggcgggcagcgccgcgagcagcaggacgaggcttgcacttcgacggacaagggctttcatcaacagatcctcccgggattcaaccgatggtggtccaggcgcgtgacctggccgatgcaatgacacgatcaacgatccgcgccgaacgcatgccgtcctcgaaggtgggcaggccgtccggttgctcgccgtcgatggcgcgataggtgtcggcgacaaacgcctcgaagcactgggcgtagccctgcgcgtgcccggccggcagcaccgacagccggcgctgttcggcagtgcccgcgccgggcccgcgcacgaagatttcctcgcgctggtcgggcaggccgatccacagccgctcggcgtcctcctggtcgaaggcgatgctggcgttggcgccgtcgatctcgaaccagaggcggttgcggcgtccggccgaaacctggctcaccgtcaacgacgccagcgtaccggcgccggtcctgaacatcgccgttgccacgtcctcgctcgcgaccgcctgcgtcgcgccgttcgctgccggtgtgctgaagctctggccggtgacggcgctgcgttcggcgatcaccgtggcaaacgccgcgttcacttcggtgaagcgctcgccactgacccattcgaccaggtcgcaccagtgcgaaccaatgtcggcgaacacgcgcgaggtgccgcccagcgccgggtccacgcgccagttgttgctggccgggtccagcagccaatcctgcaggtaactgccatggatcaggtgcagcggccccaggtcaccctgggcgatgcgtgcacgcgcctcgcgcaccaccgggtggtagcggtagacgaaggggacggtggcaaccaatccggtcgaggcggccagtaccgccagcgcctgcgcatcgtccagcgtcgtcgccagcggcttctcgcagatcacgtgcttgccggcttccagtgcagcctgtgccatggcgcggtgcagatggttgggcgtgcacacgtgcaccacatgtacctgcggatcggcgatcacctcctcgatatccaggtaggcgcgcgggacattccaggagtgcgctgcctcatgcgcgcgctgcggtgacgaggcggccacgccgcgtacctcggcgccggcgagcaaggccgcgcggcggtgcacggcgccgatcatgccggtgccgacgatggcgattccaagcttgggcatcgacggggatcctcagggtgtggagggcgcggccgcagccgccggccggtcgcggaacagcagcaggaaggcgaccagcaccaccagcgcaacagcggccgggaacagccagatctgctgccagtcgggaccggcctcggtggtgaagtgctccaccaccgcgccggacaggaaggtgccgatcaacatgcccacgccataggtggccagggtgatgaacccctgtgcgctgctgcgcgcggcagggccggcatgtgcatcggtgtagatctggccggtgacgaagaagaagtcgtagcagatgccgtgcagcacgatgccgatcaccagcagcgggaagccgccacctgcatcgccgaaggcgaacagcgcgtagcgcaccacccaggcggccatgccgaccgccagcatggttttcacccccagccgaacgaacaggaacggcatggccagcatcagcagcacttcggaaacctggcccagcgactgcaggcctgccgcgccgcgcacgccgaggtcgttgagatagggattggtgaagttgtagtagaacgacagcgggatgcagatggcgatggaggccaggaagaacaccaggtaggcgcgcgacttcagcagccgcagcgaatccagccccaggatctgccccagcccggcgtcgcgctgctgcgccagtggcggtgtgtgcggcagggtgaacgcatacagcccgagcaccagcgacgccgccgccgccatccggaacgtcagctcaagccgatgcgcctgttcccagcccagccagccgatcagcacgcccgccacgatccagccgatgctgccggccacgcggaccagcgggaactgcttctcgggtgattgcatgtgccgcatggccacgctgttggccagtgccagggtcggcatgaacagcaacatgtagcccatgacgcacgcagagaacatgctgaagctggttgccgtggacgccagccacatcagcgcggcaccggccagatgcagtaccgcaagaatgcgctgcgccgcgaagtagcgatccgcgatcagcccgaccaggaacggcgccacgatggcaccgatcgactggctgaggaacgcggtcgcgacctggctcgcgctggcctgcagcgggccctgcaccaggtaggtgcccagggtgacgaaccacgccccccagatgaagaactgcagaaacatcatcgcgcccaggcgcgacatggcgtgcgtcatggcttgccctcccggggcggtcttggctcagattcccagcatgcggtgcagtgatgcggcgtcggtgccactgtcggcgaagtcatcgaaggcgcgttcggtcacgcggatgaggtggtcgcggatgaaggcggcaccctcgcgcgcgccgtcttccgggtgcttcaggcagcactcccattccagtaccgcccagccggggaagtcgtactgcgcgaacttcgagaagatcgccttgaagtcgatctggccgtcaccgggtgaacggaaccggcccggacggtcgatccagtcctggtagccgccgtacacgccgctgcttgcgctggggcgatgttccgcgtccttgacgtggaagatgccgatgcgcgcgtggtagcggtcgatgaaaccgaggtaatccatctgctgcagcagcaggtggctggggtcgtacaggatcttcgcgcggggatggtggtcgacctcatcgaggaagcgctcgaaggtcgcaccatcgtgcaggtcctcgcccgggtggatctcgaagcacaggtcaacgccgcaggcatcgaacgcatccaggatcgggcgccagcgacggccgagttcggcgaaggcttcttccaccagtcccggcgggcgctgcggccaggggtagaagtagggccaggccaatgcaccggagaacgtggcatgcgcggtcagccccaggcgctggctggcctgcgccgccagccgcagctgctccaccgcccaggcctggcgggcggccgggttgccgcgcttgtccggtggcgcgaatccgtcgaacaggctgttgtaggcaggatggacggcaaccaactgcccctgcaggtgggtcgacagttcggtgatctgcaggccgtgcccggccagcatgccggcaatgtcgtcgcagtacgcctggctgcgcgccgcctccgccaggtcgaacaggtggggcgcggaggtggggacttgtacgccagaatagcccagacccgcggcccatccggccagcgtgtccagccgatcaaaaggagctgtgtcgccgatgaactgcgccaggaacagcgctggacccttgagcgtcttcaacgtgattcgccctcgatgcaatcgattgcattatcctagcaggggcttacgcaggacctgttgtgcagtgcacagcgggcaggaggactaacgccatggccaccatctacgacatcgcaaaacacgtcggcgtgtccgccggtacggtgtcgcgcgcgctttcccggccggacaaggtgctgccggccacccgcgcgcgcatcgagcaggccgccgccgcactgggctatgtgcccaacacggtggcgcgcacgctcaagacccagcgcagcggcaagatcctggtcaccgtcccggacatcgccaatccgttcttcgcgcagatcctgcagggggcggaggaggccgcgcaggcggtgggctatgcggtcctgctgggcgatacccagcatcaacccgatcgtgaggagcgctacgcgcagatgctccggcgcaacgaggccgacggcatgatcgtgctgggccatcgcctgccaccgaccgcgcgcgagatcgtcgagcagcgcggcgccgccgcaccggtggtcaacggctgcgagttcgaccccgcgctgggcatccccagcgtccacatcgacaacgccgccgccgcacgcgcggtgatggagcatctgtacgggctgggacacgaacggattgcggtggtcggcgggccgcctgacaatcccctgcaccagcaacggctggaaggggtccgcgcggccggcaaggcgcgtggccgcctgcgccagctgagcatcgtgccgggtgacttttccgtggaatccggccatgcagcggcgatggcgctgctggatggcacggccgcgccgaccgcggtgttctgcttcagtgaccagatggcactgggtaccctggccgcttgccgggacctgggcatccgcgtgccggacgagctgtccgtggtcggcttcgatgatctggcgtcctcccgctacctcacgcccccgctgacgaccatccagcagccgatgcgggagattggcgagcgtgcggtcaacctgctgctcgccatcatcgagcacgtcgatgtgccgcttcagcagacgctggagttcagcttcaagctgcgtggctcgacggctgcgccccgccccgggtaaccacggggagcgggaggggcagcggcagcggcccgcgcgatatcgcgcaaccttgatcccgaattgacgcaaagctgtcagactcatcgcaggcagcccggcaagggccgtagcaccaggtgcgatcgcgcaagggggtcggcaatgccattcttcaccgattcggcggaaggcgcggtcgaaggcattggcgcggcacgtcgcatcggctggatgcgtttcgtcggcaatgggctgggggcgatccccatcgcttcgatcatgcttgaacgccatgacggcgggctggcctgggtcctgctgctgctcaacgcgctggcgtggccggcactggcactgcggctgacccagcgctcccgccagccggcggtcgtccagttccgttgcatggtggccgactccttcttcggcggtggctggatcgccttcatggcgttgagcgcggtgcccagcgcactgttcgccgcgctgctggtggccgacaagatcgccgccggtggcgtgcgcctggcgatgcgcgccacgctggccctgctgctgggcttcgcactcacctggtggttgctcggcttcccttaccagccggtcacctcgcagcgcacgatcgtgctgagtgtcccgttcctgttcgtgtatggcatcggcctcagcattctcagctggcagctggcgcgccgggtcaaatcgcagaaccgtcagctgcagcggctcagccggatggacccgctggtcgagctggccaaccgtggcttcctgatcctgcgtgcgcagcaggcgctggaccgggcacagggccagggcggttttgcctgcctgctgatgctcgatgtggatgatttcaagcgcatcaatgactcgcatggccaccgcgccggcgacgaggtactgcggcatatcgcggcgacattgcgcacctttgcccggcccggtgatacgcccgcgcggctggggggcgatgagttcgtggtgctgctgcgcgactgcgcacccgtcgatgcgatgcacgtggccgagcgggtgcgcctgcacctgctggaggccgcgcagcaggccacgccgggtgtggagttcagcgtcagtatcggcattgccgccacaccgcgtggcggcagtgtcgaggactggttggcactggccgaccgcgcgctgtaccacgccaagcggcagggcaagaacacggccagctacggcgagtgagtgcggcacggccgccgccgaacgagggtgaaatgccggttcatcctgcacgcggaatcggcacgccaatcctctaccatgggccaccccgcccggacgcgctcccatgcaagacgctctcgttgcccagcccaagccccccattccaaggatcgcggcgtggctgatgatgctgctgggcatgtggctggcgctgaagctgggcctggtggtgaccctgctgtccggcctgctggtgttccagctgacgcacgtgctggcctccaccgtggagggcaagctgccgccggggcgggcacgggcgatcgcagtgatcgtgctgtcggcgatcatcatcagcgggctggtactggccggcatcggcgtggcctcgttcttccgcaacgagaccggcggcccggacgcattgctggcgcgcctgatggagatcctcaacacttcgcggcaccaggtgccggcgctgctgcaaccctacattcccgaagacatgccggcgttgcgcgcggcgctgaacgactgggctgccgagcaccagcggcagctgggcgtggccggtacctcggtggtacaggtcggtgtacgcgtactgatcggtatggtgctgggcgcgatgatcgcgctgtatgacgaactgccgctgccgaagatgggcccgctggcgcaggagctggtcgggcgcaccagccgcctggccaccgcgttccgccaggtggtgttcgcgcaggtgaagatctcgctgctgaacaccgtgttcaccgccatcttcctgctgggcgtgctgccgttgttcggcgtgcacctgccgctgtccaagaccctggtgctgatcaccttcctggccggcctgctgccggtggtgggcaacatcatttccaacacgatcatcgccatcgtcgcgctgtcggtctcgttctatgtggcggtggcggcgctgctgtacctgatcgtgatccacaagctggagtacttcctcaacgcgcgcatcgtcggtggcgagatccaggcgcgtgcctgggagctgctgctggccatgctggtgatggaggcggccttcggcctgccgggcctggtcgccgcaccggtgttctatgcctacgtgaagcgcgaactggtcgaccagcgctggatctgacgcggcggggcatgacgtaatttgccccgattcgacaacccgtgcggcctttgtcggtgcgttcgcggcgggcgcggtatacccatggcaacgattgatccggtagcggcttggcgcctgtgcaggcggccgctacagtgttgtgcactacaggggaaatgtgcatggcccgcaaggcgtcgcccatcggattgcggacctgggtctggatcctggccgggctgttcgtagtctgtacgctgccattgatggccatcgcgctggtgcagggcacgctgcgcttcactgccgccgaggacaacctggtcagcctgcgccagctgcggcagaccttcgacctggccaacctggtgtcggccgagcgcggccccgccaacagcctgctcggggccgacacggccgatgcgggcgaacaggcccggctggcggcggagctggcagtcgcgcgcaagcgggtcgataccgccctgcaacgcctggacaccgtgttcaacgctgacccgggcgtggtcgacgaacacgggctgctggccgatgcgcaacgtcgcctgcaatcggcgcgggccgcggtggaccgggtggcggcacagccgcatggcgcgcgccaggtggaggacgtggagcgcgcgatcagcagcatgttcgccgtggttgatcgcctgcacgtgctgagctcggcgcagatcaacgtgctggtcagcgccgaccgcgaagcggcgattccggcgatgcagggccaggtgctgatcgacctgcgcgagcatggcggccgcctggcctcgaacgtgatggcgccggtggcggtaccgggggcctggcgtgacgaacaggtgcgggcggcattgcagaccgaaggccgcctgctggagctgtggcggctggcaggcagccatgaagcggtgttccgcagtgatccggcgctgtcctggcattgggacatggcgcgccggcagttcttcggcgagtcgctgccgatgatcgaacagttgatcgaggatggccggcgcggcgtgccgccgccgtggaccaccgccgaactcaccacccgctacgtgccgaccctgcggtcgctggaagcgctgcgggacgactacctgagcgtgtccatcgcccgtttcgaacgcacccgcaatcgcgaagcgacgcgcctggtggtgctggtggcgacggtgctgggcacgctggtggtgctgggcgtggcgctgcgcatcgcgcatcttcagatcctgcggccgctgctgcaggcgcagaagcaggtcatccagatcgcctcggaagcgcccggcccggagcagcatgtgacccacccgctggccgagatgcagcgcctgttcgatgccatcgaagtgctgcgcgagaagtcgcgcgagcgctcggcattgaccagcgagctgcgccagctggccggcaccgatgagctgaccgggctgttgaaccggcgcgcgctggacgagttggtgcagcagcgtcatgccgacggtggcaacagcgcggtggtgatcctgctggacgtggaccgcttcaaggcgatcaacgatggccacgggcatgacgccggtgacgaggtgctggtgcaggtggcgcagctgctgcagcgccacctgcgccgcagcgacagcattgcccgctatggtggcgaggagtttctcgtgttgctggccgacggtgatctggccggtggccgccagctggccgagtcgctgcgggtggcgctgcagcggctggacatcgccctggtcggtggcaaggtgctgcgcgtcaccgccagcttcggtgtggccgagggcggcaccgacgcgctgggctggcgcaccctgctgcgtgccgccgacgcggccatgtaccaggccaaggcgcagggccgcgaccgcgtgcgcgtggctggcggcggccgcaacgcacgttgacggcacccatcagccgatctgcgcatgcacgcgccgcagcgtgcgcgcaatcatccggcgcgcgatgggacgcggcaccgagagtccacgccagcgcagcgcacccacgcggaaggtggcgctggcagtggccagcaccttgccggccgggtcggtcagccagccgcgggtgaaggcgatgctgcccttgctgtgctcgacttcgccccagccgatgatccgcccgggccgtgcggggctgacgaaactggtcttggattcgaccgtgaccgcgatgcggttggcaggcagggtggcgtagatcgctggccccatgcagtcgtccagcatcgctgacaggaaaccgccctgcacgttgcccatcgggttggtgagcaccggcccggcctcgaactcgacctggatgcggcgcagtgcatcgtcgtaaccgacgaagcgccagccgagcagggtgccggcctgggagcgtggaagatcaccgttgatcgcgctgtagaagatcgattcgggattcatcgtggagcctcgcgggggagaggggagaaaaaaactcactgcggtagcgacaacagggccagcacgaatccgatgaccgacagcagcaccaccgcggcgccggcgggcaccggtgtacgcgcaccggtgcgtcgccgcacgccggaagcgaccaggaccggcggcagggtggcgaccaggcagaacagctggaacgccagcagctgcggcagtgcgaagtgacctccgaagaagatcaaccaggccagcatcacgccggcaccggccagtgcgatccaggcagcgccgaccacgcggatgagtgccatcagcagcacctgcatgcgggggtcgatctgtgcccacggcctgttcacggcctggccgtggtagggcatgaagtcggagcgtttcagataggccgcagcaaacaggcagacaatgaagaacgccaacaggtagcagccgaacgcgagccaggcggacaggtccatgtggaggccatgcggttgcggaggaaaggccgcgtttgtaccggcagccatgccggtcgcgccacggggttgcgcgattctggggcagcacgccgttaggggcgtgtcgcggcttgcagggtcgttcctccatctgccgttaacgccagtgtggtggtgaggaatgcgtcacgtacgcgccatgcgccctatctcgtttcctgtgaagaggccgcaactacccgtccacgcccaggtcaccgcgctgcgcagacgctgggattccattccatgaaggacgacgccatgacccagctcaccctgcccgaactggccaggaaaatggccggcattgatttcaccctgctgcagacccacgccggtggagagattgccggccgtccgatgagcaacaatggcgacgtggactatgacggtgacagctggttcttcaccaccgaagacaccgacatggtgcgcgagattgaagctgaccccgccgttgcgctgggtttttccggcagcaagtcgctgctgggcaagccgccgctgttcgtgcacgtgcagggcagggctgtgctggtgcgcgaccgggccacgatgagccagcactgggtgaaggacctggagcgctggttcgaacagggcgtggatacaccggggctggtactgatccatgtgcgtgccagccgcatccactactgggatggcgaggacgagggcgaaatcgtgatctgaccggaaccgcgcagcgcccggcgcatcgcgttccagggtcagcagtgcgcagggtgtgctgccggatcctcaaggttggccagttccggtgccaaggcgtgctccaccgcacgccgcagtagtgccggtgcgacatagtgccggtgcccggcgtcgatcagggccatgtacatgccgccgaacgcattgagggtctgcacgcgtgagcccaggctgatctcgacatgtccatcgcgatgccgctgcacgcgcacgctgctgcggaaacgcaggtgccgatcgtcggcgccgagcaggacttcggcgtcgttgtcctgcgtatcgatgtgcgaatccagcaccggaaatcgaccagcgaacaaccggctgcgatcggtcgacagcaatgacgacaccgggcatcccagcggcgacgtgcgcaaccgcaacggtgccaccagtcggtttcgcagcgccatcagctggcctacgccgctgggtggattgcgcaggaagccccccagtacgtcggccagcagcgccgacgcggaacggtggagcacctgcgagggttccaggcacagggtggtcaggtcctggtagtggctgtgcggcagtgctgtggtcagcaggccatcggtgggcgcgggccgcgaatggatgggataggccggtgtggcacgttcgacgaacccgcgcagcggccgcatggggatgcggcgcagcgggccgagcagggcacgggtacgcgcgcacaggtgcgcgcacacgctgggaggtgccgcctgcagcgacagctgcaacagcggtgccgccgcaagcgaggtgcacgaaggccagtacgattccggaagcacctcggtcaggctggggatatcggcggcattgcgctccacctgcgcacgggtctgctcgctcattcggcctgccagttcatcgctgtggcaggacagcgcaaacagcgccggatgtgcaggatggttcgacgcgaactggtgccaggtgccgccgccgaagcgcacggtaaacaggcagtccggtgggatgcggacgcgccgaagcgtgcgcgcgaaggcaccaggacctgctgccagctgcgtgtcggaggcggtggcgaaacgcagctcggctcccgcgctgccggcgatggcggtgaacatgcgcgggcctgcatggcgatgaaacgggtggccaccggcaccgacggtgaagctgtacagcgaggaggcatccccgtgctgcaggtgcatgccacccagtcgcgccgaaggttcatccaacgcatcgatgaacgccgggtggtggcgctgacgctggccggcgtcactcaccagcgcgtcgccggcaccgatgccgagctgcgcgatcagggtgacttcggtcggactgccgccgtcctgtgccggaagctgcactgctggaaacgaacggcgatcgcgggtcgaaccaggcatggtcatgctccttggcggggcggatcagcgggcgggggacttgcggcgggcgcgggcttcacgcttgagcgggccgccgaccgggcagacttcggccgcccacgagaacaacgtgttggccaaacggtcgggtacctgcctgaagtacacgaactggccgcgcttctcgcgttcgatcagtccggcttcctcgaggatgcgcaggtggctggacaacgccggcttgctgaagtcgaagcgctcggccagctcgcccgcgctgagctcgccggcgctgagataggccaggatctgccggcgggcggtggaggcaagggcttcgaagatgcggtccatggagagctagttaactaattcgttaattcatgttgctcccgcagcttaggactgtcaagccatgacccattgcgcggcgcgcccgggctttgccatcctccctgctgttttccgtagcgtggaatcccgatgcgtcctgcgttctggctggctttggccctgctgcccaccctggcggtggcgcaacccgcgcgtactcccaaggccaaggccccggcgcaggatcccttcagcgagttgttcgataccgcctgcatgcagcacatcggcgcgccggcgcggttgcagtcgctgatggaatccaacgggctgtcaccgctgcagcctgccgaagcggcaacgttgctgcagggacagtcgggcgtggcctggatggtgccgctggccagcggccgttatgcggtcagctgggccgacgacggcacctgctcggtgtatgcggaaaaggccgatgcggcggtggtgcagaagggcttcgcacggctggtgcaggcggcaccgaagccattgcaggcgcgctcgctgccgggccgtggtccgctgtcggccgaccaggtggcgatccaatacggctgggccacgccggggcaggccaagctgcaggtgcgcttccggctggtgacgcggcaggcggccgaggccggcgtacaggcgatggcctcggtgacgccgggggacgcgatgctcgaacccgcggctcccacccgataacgcctgccggggcccgcgcccagccggtggaccatgctcgcgattcagcctttcacgcaggatgtggtatatcgtttatcgataaatccaccctggggcggcgaggccaccccaatgccggaggccgcttgaccgctcgtcccgcccgcgccagacccgcgcgaggcttgttcaccctggcccaggccgccgtacaggccgtccgggcgatgtgctggctgggtatcctggccgcactgctggcggtgccactggtcgcccatgaccgccgctggctgctcgacagcgtgcatgacgccgaggccgccgccgcgcatggcaacgacctgttcctgcacttctgcctgggcctgggcgcgatcgtcgcgctgctggtgctgtgcctgctgttcctgcgccatctgctgaggctgctgaagtcggcggcgcgcgagcggccgttcacccatgccaatgcacagcgcctgcagcgcatggcctggctgatgctggcaatggaactgctgtcgatcctgatcggtgcctacgcggcctggatgggcccggatttcacctggatggaggtgggcggcggcatgtcgatcactgggctggtggcggtgctgatgctgttcgtgctcgcacgcgtgttcgccgtgggcgcggcgatgcgcgatgaccttgatggtgtcatctgatggcgatcgtcatcaccctggaccgcatgctgcaggcacggggcatgaccctgtccgagctggcggggcgcatcgacatcaccctggcgaacctgtcgatcctgaagaccggcaaggcgcgagccatccgcttttccacgctggatgcgatctgccgcgagctgcagtgcacgcccggcgacctgcttgggcatgacccggcgcaggcgcaggatgccgactgagtggacgccctcttcccttacccactgacgaaacggacctgaaatggaatggttggctgacccctcgatatggatgggccttgcaaccctggtcgtgctggagatcgttctcggcatcgacaacctggtgttcattgcgatccttgccgacaagctgccgccgcaccagcgcgaccgcgcgcgggtgatcggcctggcgctggcactgctgatgcggctggtgctgctggcggcgctggcctggatcatgaagttgaccgagccgctggtgaccttgttcgaccacagcttctccgggcgcgacctgatcctgctgggcggtggcctgttcctgctgttcaagggcaccatggaactgcacgaacggctggaaggccgcgcgcatcacgaggatggcaagaaggtctatgccagcttcgcgatggtggtggcacagatcgtggtgctcgacgcggtgttctcgctggactcggtgatcaccgccgtcggcatggtcgacaacctgggcgtgatgtatgcggccgtgaccatcgccatggcgctgatgctgctggccagcaagccgctgacccgcttcgtcaacaagcatcccaccgtggtggtgctgtgcctgggcttcctgctgatgatcggcttcagcctggtggctgaaggcctgggctacaagatcccgaagggctacctgtacgcagcgatcgctttctcgatcctggtcgaggcgttcaaccagtgggtgcgtttcaaccgtgagcgcaacgagcgccgccagccgttccgccagcgcaccgccgatgccgtgctgaggatgctgggcgcgcgtccagcgaacggccacgacgacgaaggcgtggacgagcaggtggacgccgacgagcgcctgcagccggcggagcacgaaatgatccgcagcgtgctgggcctggccgatcgtccggtgtccagcgtgatgactgtgcgtgccgacgtgcaatggatcgacctggcgcgtggtcaggaggatgtggtggcgcgcctggtggcctcgccgcatacgcgcctgctggtcggcgacggtgacctggacagcctgcgtggcgtggtgcagagccgggacgtgctggccgacctgctgcagggcaagccactgcagctggagggcaacctgcgcgaaccgcagtacgttctgtccactgccagtgcgctgcaggcgctggaactgatccgccagcatccggtgccgctggcggtggcggtggacgagtacggcagcgtggagggcctggtgaccgccaacgacctgctggcggcgattgccggtgacctagtcgatacccaggacgagcgctatggcgtggtggcgcagggcgaggatcaatgggaggccgatggtgcgctgaccctggacgacctgcagcgtttggcgggcgtgtcgctgccccgcagtgccgactacatgaccatctcgggtctggtgctggagcagctgggccgcctgccggacgtcggcgacgcggtggaggtggccggcgtgcgcatcaccgtgctggcaatggagaagcgccgtatcgcccgcctgcgggtggagcgcctcgacggaatggcctgaccgcctgttgttgtagagccgggcccatgcccggctgcgtgtcgagaagccgagcatgggcccggctctacacaacacgacccgcagccgtcaccatggcgggcccgctttctgtcatggatggttgcagtgctgagtacgatcggtttgttgatgggcctgtatgtggcctggcgcctgttctggccgctgcgcatgcccctcgggttgaaggtcgtgctctcgctgctggtggtggccatggccgtgcagccgcgcatcgtggccaccttctggggcacgatggcatcaccggaaatcccgaggatggccatcgccgtcctggccaccggctccacggcggtgctgctgctggcgttgctgatgctggtgctggatgtgggcctgctgctttcgcgcctgctgcgttggccgcgcatcgtatcggccctgcgcgcctcgaagctgcggccgttggccggcctgctggcgctgcttgtgagtggctatggcgtcagccagggcatggccgtgccccagcccaggcagatcgacgtggcgatcaaggatctgcctgctgcgttcgacggctatcgcgtgctgcagctgaccgacatccacgccagccgcctgctgaccggcgactgggtgcgcagggtggtggacgagagcaacgcgctgaagccggacctgatcgtgatcactggcgacctgatcgacggcagcgtcgaggcccgccgtgacgacgcgcgcccgttggccgatctgcaggcgccggacggtgtcatcgccatcaccggcaaccatgagtactacgcgcagtaccaggactggatgcaggcattccgcgcactgcgcatgcaggtgcttgagaacagccacatgcaggtgcggcgcggcgacgcggcgctgaccatcgccggtgtcaccgatccggtggcggcgcgctatggcctgccgttgccggatctggatgctgcgctggccggttccgatccgtccgcaccggtgatcctgcttgaccaccgcccgcgcaatgcgcgcgaggcggcggcgcgcggggtaaagctgcaattgtccgggcatacccacggcgggcagatcatcggcatggaccagctggtgaagcgggccaatggtggctttgtctccggccgctacgacgtggaggggatgacgctgtacgtgggcaacggcgcgggcctctgggccggtttcccggcgcgcatcggcgtgccttcggagatcaccctgatcacgctgcgccgcgcgccttgacctgatgtggggtcagatccctttgcctttggcaaagggatctgaccccggcccgtcaggccgcccgcagcggcggccgcgcatgcgcacttcgacgcagggcctgcgcccgcttggcgatccagcgcaccacgaaggcggtgaacagcagcgccgacggcaccgcataccagaagttgccgggcacgcgcttgaagtacgagtaggtgaacaccgccgcgatgatccacatgccggtgacgtgcaggcgacgccaggcggtgggtcccatgcgccgggcgagcccccggtgcgaggtgatggccagcgccaggatggcgatgtagcccaccgtgcccgggaggttggccagcgcggagcgtgctggccagaacgccgggttgaggatgccgaaactggtgatggcgactgcgtgcagcaggtgcgagaacgcgaaggacaggccgatgatgcgccgttcgcgcagcaggaaccgggtgaacgggccgggcagcagggtggcgaaggaggatgccgtgaatgccgccaggaacagcaggaacgatgtgcgggcggtgagccggatcgccgcgcggctgccttcggctgcatcgggatacagggcgaaggcggtcagtgcgaacgcgatcaggaccacggcgatggctacgaacagacgccagccgtgcaggaaggaaatgttggaagcagccatgatgagacctcgaagtagggggcgggtagtgccggccgcttgccggtcaatgaacgggtagtgccggccgctggccggcaacctcagaaagcaggcaatgcaaccagcacccccgccgtgcacagctcgcccagaacgggcacgcaggcagcacgcaatgcgtccgttgccacgtcatgtgtttcggacagcgcctgcagtgcctcatccacacgcgcgccgtcgtcaccgaagaccgaaagcagcgcgtaggccagcggtgacggttgctcgaccttcaggctgaaatcggcgcggcgctggatcaccagcagcgtgggagctgcgcccaacaccggttccagcccctcgtcctcatgcaccggccaccggtacccaagcacccgcaccagcggcgaaaccgccagcacatcactgtcctcgggtaagcgctgcagcagacacccagcgccacgcgcttcaatgtgcagcgactgctgcgtgctctcgtagtgcgccagttccgccgcccagcccggcagtgccagcgtgtcctgcactgccagccaggccgcgaactcgccggcgatccgtgggaacaacggggtctggcaggtgtggcgggcgtaatagtgcgccacggtgtcgcgccagcgcgacgtgcccaactgctgttgcagtcgcggcaggctgccggccagcagggtgtccaggctgtcgatgcacaggcggcggtataccgccagcctgcgcgcctccacgccatcgggtgcggtctttgcagggtcccgcacatgatcggcccagcgccgttgcagggtagccagcggctcagccatgggccacctccggccaacgtgcctcagcctgtgcctggcggatctgcgcgacctcggccagcaacccggccagcggcgggaagttgaagtcgcgctcgagcagcgtgggacgcacgcccacccgcatgtaggcctcgcgcaacagcgcccagaccacgcctttcaccggcgcaccatgggtatcgatcttgaagccgtcgtcttcatcgaagtggcccgctacgtgcagcgaggcgacacggtgggacggcacgtgggccaggaattcgaaggcgtcgtaaccgttgttgcaggcattgacgaagacgttgttgacgtccagcagcaggtcgcagtcggcttcggcgagcacggcgttgatgaagtcgatctcgctcatgtccgcgccggcaacggcgtagtaggaaatgttctccacggcgatgcgccggcccagcatgtcctgcacctgggcgatacggccggcgacatggtgaacggcctcggcggtgaacggcagtggcagcaggtcgtagacatggccaccggcggcgcagtagctcaggtgttcgctgtacagctgcacctggtgcaggtcgaggaaggcacgggtctgtgccagcagggtgcggtccagcggatcaggaccgcccagcgacagcgacaggccgtggcaggtcaaggggtggcgctcgctgagttggcgcagcgcgtcgccgtgtgtaccgccgacgccgatccagttgtcgggggatacttcgaggaagtcgatggcaccggccggcatggccagcagttcgtcgatcaggccacggcgcaggccaagaccggcggcatgggtgggcaggggcagggacatggcggatgctccacagagagcgccgccttgaaggcggcgccgggtgaacgtcgatcaatcggcaacgcgggagaacaggcccttcggcatcggcttgccgttggcggtgtagacgctgcgcaggtagtcgtgcgcttcctgctcgctgatgtaaccgtcgtggtcggtgtcgatgcggtcgaactcggcggcacgcttggcggccacagcgttgaattcggcacgcgagaccttgccgtcgtggtcgcgatcagtgcgggcaaacgaggcgtcgccgcacttgccttcgccacactggccctcggccaccttggccttgccggcgggcttgccggtggtggccttgttggccccgcacttgccttcaccgcacttgccttcggcggcggcgctcatggccaccgcgctgatcgccagcggctggatcgccgcggcctggccggccagcagcaggccaccggccagggcgatgccgatggcaccgatgcgcggcaggcgggaggaagaggtgttcttggtcgagatggacatggtggtgactccttgggaaagcacgcggggcgtgcgggatggacgccgccgaagaggcgacggaaagcgaaacgcgcgggaacaggggagtcggctcaggcggcgcggcgacggcgcagcagatggcccagcaccagcacaccgccgagcagggcaccgccgaagccgatgccgggcaacagcgcggcaaccggcagcagcagggcgatcaggctgacgccccaacccaggccgtcattgcgtgccgtggcacggccggacccggccagcagccggtccacgctgagtgcgccaccgccgttgaggatcagtggcagcagcatggccaggaacagcaacggcagcttgaagttgccgtagccctggtcggtgatcgcatagccctgccagagttcacccaggccgttccattggtcgggccagtgcacggcggcgatggcaacgatggtgagtacccagaacacgtaggccaccgagcgcgtggccaggccgagcagcagcatcaccgcacccaccagttccagccacgtggccagctgccagttcagcgacgcgggcagtgtcgagaacgggaacgggaagcggccttccaggtcggcgaaccagttctggccgcccagcttctcgcggccggattcaaagaactcccaggccagcagggtgcgcagcgccaacggcgagagccagcggccgacggcgtccaggcggggcgtatacacggaagaagcggtgctgatcatggtggtgtcctgcgggccagtggtcgatggaagccattccaggcggcgcaggtatcggcaacgtgtgccgttgcccggggttttgtcagcgactgtggccgcggccggggtttcgtacagtcagatacaaagacgatgcgcggatgcgcatcggggcgttgcgcgcccgcgtgcgggcagcgatatccacccgaaagcgcccggccaggaccggcgcgcgaatgtatcccactgtagaaacccgcctgcgccctacagtccggtacaactccgcgctgcggagaaacagcgccgatacaccggcaggcggaaatggccactcccaactccggagtgcccccatgatccgtacctgcttgctggccgccgctctcgcccttgccgccgccgcccctgccttcgctgcccgggccgataccgctgcaccgcccaccgtcatcctggtgcacggcgcgttcgctgatggctccagctggagcaaggtcatcagcaccctgcatgactggaagctgccggcggtggccgtccagaatccgctcacctcgttggccgacgacgtcgccgccacccgtcgtgcgattgccgctgcgcctggcaaggtggtgctggtcggccacagctggggtggcacggtcatcaccgaagcgggcaatgacccgaaggtgcaggcgctggtgtacgtggcggcgttcgcgccggatgcagggcaatcatcggcgcaacagggcgaaggcttcccggtcggtccgggcctggcccgcctgcaggaaagggacggctacctgacgttgccggctgacgctgtcgcccaggacttcgcgccggacgtgatgaagaagtcggccgcactgctgtacagcacgcaggtcccgttgaaggccagcgcgctgggcgaagtagtgaacgttgcggcgtggcgcagcaagccgagctggtacgtgctcagccgtgacgatcgcatgctgtcgccgcagctgcaggccgccaccgcaaaacgcattggcgcgcagctgcaatcgatcggcagcagccatgtgtcgctgctttcgcatccggcgcaggtggccgacagtatcctggaagcggcgggggtgaagccggcggaactgccactggccgagcaggggggctgagcgatggccggcctgcgtgcgtacgtgctgccgttgctgatgggcgtgctgggtggggctgcgctgttgatggcctggcccagcccggaggccgatgcgcagccggcacaggccgttcccgccgccgggttcgacggtggcgggccctggcacaacagcccgccgctcacactggagcagttgcgggggaaggtggtgctggtcgagttctggacctacacctgcagcaactgcctcaacgtggcgccgtatgtccaccagtggcatgcgcgctacgcgtcgcagggcctgagggtgatcggcgtgcatacgccggagttcgcctatgaagggctgcctggcaacgtgcgcaaggccatcgcacggttggacatcgcctggccggtggtgcaggacaaccagtaccggatctggaacgcctggggcaaccgcttctggcccgcactgtacctgctcgaccggcaggggcgggtggtctaccgccattacggcgagggcgactacgcacgtaccgaaagcgagatccagcgcctgctggccaacccctgagccgcgctaccatggccgcaccgcgcggccttgaccttcgtcctcatcgagaacgcaatgaaccacgtaccgcacatcctggtcgtcgacgatgacagcgagatccgccagatgctggccgattacctgcaacgcaacggcctgcgcgtgagccaggccgacggtggccgggccatgcgcgcgctgatggatacccatgccgtggatctggtcgtgctggacgtgatgatgccgggcgaggacggactgagcctgtgccgtaacctgcgcgccggcaagcatcgtgcggtgccggtggtgctgctgaccgcccgcgacgacgaaaccgaccgcatcatcggcctggaaatgggcgctgatgactacgtgaccaagcccttctcttcgcgcgaactgctggcacgcatcaatgcggtgatccgccgcacccggatgttgccgccgaacctgcaggtgagcgaagccggtcgccagctggccttcggcgagtggcgcctggacaccaccgcacgccatctgctggatgcacaggacaccgcgtatccactcagtggcgccgaattccgcctgttgcgcgtattcctcgatcacgccaatcgggtgctcagccgcgaccagctgctcagcctcacgcagggccgcgataccgaactgtttgaccgctcgatcgacctgctggtcagccgcgtgcggcagcgcctgggtgacgacgcacgcgagccgacctacatcaagaccgtgcgcagcgaaggctatgtgttcagcgtgccggtgcagttgctggggccggacgaatgaacgccaccgcacgccgcccacgctggccgcgcacgctgtcggcgcggctgctgctggtgctgctgggcggactggcgctggcccacgcactgtccttcagcctgctgttcttcgaacgctaccagtccacccgcagcatgatgctgcgcaacctggacgaagacgtggccgtgagtgttgcgctgctggagcacctgcccgcggaccagcgcgatgcctgggtgccgcggctggagcggcgcacctaccgttacctgctgcgcccggccgcggccggaccggggctgcagaccgatcgtgcacgccaggtcagggcgatcatcgatgacagcctgcagcaccgctatccgttgcaggcgcgccaggtggctcgcctgccggagcggttcgaggtggaactgcgcctgcacgacggcactcccttgaccattgaagtcaccccgtcgggcctgccgctggcgcgctggctgcccgccatgctgctggtgcagctggcgctgctgctggtgtgcgcgtggctggcggtgcgcctggccatgcgcccgctgcagcagttgtcgcatgcggtggagcatctgcagccgggcaaggacgggcctgcactgcctgaagatggcccggccgaagtgggcggcgcagcagccgcgctcaacgcactgcaggcacgcattcgtggccatgtcagtgaacgcctgcagatcctggccgcgatctcgcatgacctgcagacccccatcacgcgcatgaagctccgggtggagaccctgcctgaagacagcacccagcagcggctgctggccgacctcgaccaccttgggcaactggtgcgcgagggtgtggcctatgcgcgcagcagccacgtcgccagtggcgcgccggtgtcgatggacctgggcgcgttcctggccagtgtggtcggcgattacgaggacatgggcaagccagtcagtggcggtgcgcccgctggactggtcgtgcagacctggccgcagctgctgcgacgggtggtcggcaatctggtcgacaatgcactccgctacgccggcgctgccgagatcgaggccggccgtgacgaggccggaagggtatggatcggaatttccgaccgtggcccgggcatccccgaggaccagctgcaggcagtgctggcgccgttccatcggctggaaagctcgcgcaatcgcgataccggtggcactggcctgggactggccatcgcggtgcaactggcgcagtcgctgggcggctcgctgcggttgcgcaaccgcgagggtggcgggctgatggctgagctgcagctgccggggtaacgggcggggtcggatccctttgcgggagcgaagggctctgaccccgatgtgggatctgtgacgttcctgcacggccttgggatcggcgatcatctgcagggagtgtcgaaaccaggaagcacgcaatgcagggaacgcagcattcaatccagcgcccgcgccacgtcgcgctgctggtcggtctgctcgcgctggcggcctgccagcgcacaccggacgcaccgaccgacccacccgcagcgggcacgccgcctgccgccccggccaccgcaacagatctctctccgctgctcgacgccttgccgacctgcgcgctggacggctggtacatcgatcagcagaccgggcgcccggcccatccctggttggcggcgaacgcgccgaagccctgcaaggaagacgtggagaacgagatcgccacgttctgcgtgcaggggcagtggaaggggctgccggtggaagaggtgatcctgccgacgatgacattcgtttcgttccgtggggccaggatcggcctgccgctggagaaggcacgtcccatcgtccgccagcgtttcggccaggacttcccgggtggtgcggcttacgaggagggccgcgagccgaagctgatggccgatcccgaagatgcgcagcgttcgtggctgctgtgcagcaccccggaactgggccacgacgtggacagcgagggaagcatcagctattccggcatgaacctgccctacgaccacgacggttgcagttaccgctacagcccggtcgacttctgcgatgcgcggcaccgcgcagccatcgaagatgccctccagcatcagaaacccaatttcaaccggcactacctgctggtacaggtcgatgatcgtccggagtatttccagcgcacgctggtgctggtcgatacccgcacgggcagggcaacgccactgccgttcgatgcgttcaccgggccggcgggaatgggcggtgatgctaccggctacgggacactggagacgggcgtggaccggcagcagttctgcctcgatggcgcgttgctggtctaccgcgtgttcgaggaagggcgcttctgcttcggttttgacggtgagcgcttcaccggccatgaaacccagtacatgcaggcagcggatggccgatgaccggtatttcacccgggccatgacatcctgccccgaacctgcgcaaccgggaccgaggctgttgaaggcgaacacgcaatgaccgcggcgcggcagcgctcgatgtgggtggcgggcctgtccacggtagtggagtggtacgacttcaccctgtacctgtatttcgccacggtgttgtcgcgggtgttcttcggcggcggcgaacaggcgctgctggtcaccctggccggcttcgcggtgtcctacctgatgcgcccgctgggcgcgctgtgcttcggccacctgggcgaccgcctgggccggcgctggatgctgctggcttcgatggcgttgatggcggcggcgatgctggccactgcgttgctgccaaccgcggccaccgcaggtaccacggcgggcgtgctactgctggtattgcgctgcgtgatggcgttttcggtgggcggtgagtacaccggcgtggtggcgtacctgctggaaagcgcaccggcgcggcggcgtggcctggtgacctcgctggcctcggccgccagtgaagtaggcgcactgctggcggtagcgatctcggcggtcaccgtggcgctgctcgcgcccgcgcagctggacagctggggctggcgtattccgttcttcgtcggcgctgcgctggcactggtgatcctggtcgcgcgctcgggcatgcacgaatcgcctgagttcgaacgccagcgccgcgaaggcagcattcctgccacgccgctgcggcatgtgctgcagcaccacccgctggcggtggcgcgcaccttcgcgatctcggccttgggatcgatcacctactacgtgggcatcacctatgtgcctgcgttcctgcacgcgcagggccacgatgagggcgatgcactgtggctttcgacaattgcggcggtcgcagtgattgcgatcacgccgctgtgtggcgcattgtccgaccgcgtcgggcggcggccgatgctgttgggcctgaccctgctggcagcgctgctgccgctgtccttgttcgcgtggatggcgcaggcgacgccgctgggcatcgcgctggcggcggtgttgctggcctgcgtggccggtggcgtgagcgcggtggcggccccggccacggccgagcagttccccggcgaagggcgggtgagtgggctggcactgggcgtgaccatggccacggccttcttcggcggggcaacgccatggctggcgcaatggtgggtggaacgcagcggctgggcggcggcgccgggcgcgatgatcgcgctggtggcggtgctggtgctgccggtgctgtggaccctgcccgagacggtcccgggcagggccaagcgctagcgggtcagaccttgagggtctgctcgatgtcggccagtaccgcggccgcatccacgccgatggcgatcgactgcaccacgtggccgtcccacacgctgggaccgaatgccatgccttccggcttggggatggtcatgccgcgggcaacgccgtcggtggccacgcgcacgctggcgcgctcgaactggaacagttccgggcgggtcagcgcgatgcaggcgcagcagtcatgcacgaccatgcccttgtggccggcctgcaggtagaagtccacgtagtcctgcgacagcgcacgcaccagctcggcatcggcaccgccgatcgcagccagcttatccaggccgtcacggtccatttccacgcgggtggtcacgtccaggccgatggcagtcaccggccagctggcggtgaacaccacgtcggccgcttcggcatcgccccagatgttggcttcggcggccggggtgatgttgccgttgacgtggaacgcgccgcccatgatcaccacgccgcgcaccaggccggcgatgtccggggcctgctgcagggccagcgcgaggttggtcatgcggccgaccgcgaccagggtcacttcgcccggatgggcgcggaccaggtcgatgatcagctggtgagcggggcgcgcgtcggcggccacgtccagttcggtcggcaccgggtggttgcccaggccgttgtggccgtggatgtgcaccggccaggcttccggggtggcttccggctgcagcgggccaccggcaccgcgcgcgaccggggcggcgaagccccaggcctgcttcaggtacagcgcgttgtgcgtggtcgactccaccgaggcattgccgaaggtggtggtgacgccgatcaggtcaatctgggcgtgcttgtgcaggtacagcagggccagggcgtcgtcgacgcccgggtcggtatcgaaaatgactttcagcatgttgttgttcttcttcttccgtgtggtgcggggggcgccggcggcctggaagcaggccggcgcgccctgcattgtcccatcttcatgacgggcagggccattgccgggctggcaggcccataatgccctccagtccaggcatggagccgccgaatgttgatcgttgcccttctgctggtcctgctggtgctgggcctgaacgtggcggctaccgtggtgatcgtcaggcgtgatggcctgtcggcgggtggccgcgcggtgcagctgctgctggtctggctgctgccgctggtcggcgccatcctgtgcctggcagtggccacggccgatggctcaggcagccggggggatggcggtgcaagccatgacacctccgttggctattccagtgacagccacagccatcacagccacagcagctccgactgcagcagtgatggtggtgggggggacggcggcagctgcggtggcgattgatcagacgtttcgggatgccggccagcggccggcactaacccgccgaggtcacgtcccggtagtgccggccactggccggcaacctcttcccctcagccgccgccttcggcgggcaagcggccacggcacgttcagcagcccaaccaaggtcacgtcccggtagtgccggccgctggccggcaaccaaatccgctcagccgccgccttcggcgggcaagcgcccacggcacgttcaacagtccaaccaagggcacgtcccggtagtgccggccgctggccggcaaccacatccgctcagccgccgccttcggtcggcaagggcgccggcacgttcaacagcccgcctgccgccacataggcggccagggcctggccctggctgagcagatggcgttccatggtgcgttcggcggcctgcgcgtcgcggcggcggaagcactccatcagctcgcggtgctcggccagcgattgcgcggtgcgccctggggtcagcagctggcggccgcgatgcatcttcaggatgcggtgcaggtcgtgggtgatgcggatcagccacgggttgccggcgtaatgctgcacggtttcgtggatcaggtagttgttgcggtagtactcggcgatgttgccctcggccgccgccgcttccatcgccgcatgcagggcctccagctgttgcacgccggcatcgtcgatgtgcctcaccgcctcgtgtgcgcaacggccttccagcatggccatcaccgggaacagctggttgaggtcttccagcgtcagccgggtgacccggctgccacgaccggcatcgatctgcaccaggccttcggctgccagcagcttcaacgcctcgcgcaggggcgtacggctgatacccagttccttgcacagcgcgggctcgtcgatccactcgcccggcggcaaccggtagtcatagatgcgctcgcgcacgtgttcggccacctcttcgtacagaggcgcgcgcttcttcggtgaccgcggggcaggggcaatggccatgcgcagagtgtaacgccaggtcgcgccggccagcggccggcacgacccgatggcggttacatccagcccggcaccacgaacaccagccaggccagcaacggccccagcgccaccaccagaccgctgtacaccaggaagcgacggaacaggctctcgcgctcttccttggctgccgaagccaccaccagtgcgccattggtggagaacgggctgacatcgacgatggtggacgacaccgccagcgcgcagatcacgccagcggcgctgaggtgaccctgcatcaggaacggcacggccaatggaatcgttgcgccgagcaccgcggccgacgaggcgaatgcagagacgatgccacccacgtagcagaccagcagtgcacccagcagcgggatgccgatgtcggacacgccattgccgatgaagtccaccgcgccggcatgttccagcacgccgatgtaggtcaccacaccgcagatcagcagcacggtggaccagctgatgccatcgaccgcgcccttctggctttgtggcgacagcagtgccagcgcgacagccacggtgatcgagaccaggccgacgttgaggttgtagatcagcgcggccacgcccaggccgagcaggccgatcagggtgaacaaccgctcgcgggtcaggctgacctcatccagtgccgccggatcgttggacagggtgccgccgcccgccgcgaccagcgcgccatggccttcgatcgcgaactggcgcgaggatgcctgcgggccaccggccatcgccagctcggcattgccgatcgttcccgctgccgtgatcgaaccgcgacgcagcagggcgatgccaccgaaggcgaagaagcagatcgtcgccatcatgaagttgaagcccaggctggtcaggaacaccgccatctcggtcacttccagcccggctttctgcaccacgccattggtgatgctgccgtacacgctgatgggcgagaagccgccggcctgcgcaccatggatgaccagcaggcccatcatcagtggattgatgttgtactgcttggcaaagcgcagggcgaccgggccgatgatcgcgaccgcggccgggcccagagcgccgaacgcggtgaggaccgcggtgatcacgaacatcacccacggaatggccacgatatggccgcgcaccgctttcactgcccagtgcaccagcaggtcgatggtgccgttcttctgcgcgatggcgaacaggtaggtgatgccgaccagggtcaggaacagatcgccgggaaagccggccaggacctccttgccgcccatgtcgacccacagcccgccgatgatgaaggccagcgcgaaagcgacggcacccatgttgattggcatcgcggtggcgacgatgaacatgatcaccagaccgatgatcgttgcgatttgtggactcatgcgccctcccagacacgtgactcacgtacagcgcggatggagacccgccatcccggggtaaggcgacgtacggcgtgttgcgtgatacgtactgctcgaacccgttactgcagccgttccagcgcgctgcggacccatgccgccgcgccttcaaggctctggaactcttccaccgcgcgcacctcgcagcacggataggccggcgcgaccatgcgcgccagcgcgttgcccgggcccaactgcaggaatacccgcgcgccgcgctcgaaggcctggcgcatcacctgcgcccattcgatggtctgcgccagttgcaacgaaagcgtgttgactgccgttgcgcgatcccgcaccggtcgcgcatcgatgccggccagcagcggcaggcgtggggcctgcagtggcgatgcatcgagtgcggcagcgaacggtgcgaccgccgccgccagcaatggtgtgtgtgcgggcacgcgcaccggcagcagacggatgtccgcgccctgcgcccgcgctgcatcggccagccgctgcaacgaggcgtgcgtgccgcccacgatgaaatggtcctgcccgttggcgatggccacgtgcgcaccgtgcagatcgcacagcggctgcagtacatggcgttccaagccaagcaccgcctgcaggcctgcatcggcggggctggcgctgtccatcaatcgcgcgcgctgcgccgcaagggcaaggcaggtggccgcatcgaagctgccggcaatggcgtgcgcggcgagctcgccgatgctgtagccagcgatcagcgtcggcgctggcacgcagtcgcgcagtccttgccactgcgccaggctggccgcgcacagcagcggttgcgcctgcgcattgtcgaagcggtcttcggccccagcggcggaaaatacatcgcgtccgagcaccgtgctggccagatcaaggatgtggcgtgcggccggaagatcgcgcacgcgttcgaacatctccgcgtgctggacgccttggccggggcagagcagggcaaggctcatgcgacctcctgctgcagcaggaaccaggcacaggccagcaggtcggcactgccgccggggctcagccggcgtgcgacgaatccatcaccgatgctgtgcaggcgtgcctgccagccgggtacgaaggcgccaccggcatcgaggaagcctcgcgcctgttgctgggcccagcgcaggccgttggcgccgccacggtgcagcaggttgaggtcatccacgcacgcgatcagctgcatcagcgtctggcacatcgcggcctcgcgtggcaggccgctggccagtgcgtggcgcaggacaggcaatgccacgtcgcgcagcagcgggtagccggcggccgcttgttcgcgcacgccctgcacgccgtgccgcgcgcgcgcgcgttggccggggctgttcgcatccagaggtgcgtcggcgagctcggcagcccagcggcgcacttcctggcagacctgttcggctgcggcggtacggcccgcgcggtcccggcaggcagcggaggcggccaccagcaggccaaggctgaagaccgcgccgcgatgagtgttgatgccggcggtcgcgcgcagcatcgcgatttcggcggagatgccacaccggcgcaaggcattgaagtccgcctcggctgcaccgaggcaggccacggcgatgaagtagtggcgcagcgtgaacaggctgcgcaggaacgtgccggcgtccatgtcgtggtggctgccgctgtcgaagggggtgaccaaccctggcttgggtgcaagggccagttcggcgtgcaggctggcgatggcgaggcgccccagacgcgcgctgtccacggcagctggtctgacctccggttgcacgagggcgttcacgcgctcaccccggtggaggcgaacaacgcatcacgtagttccagtgcggcaccatcgaggcgcttgaccagtacctcgcggctgcgcccggcgtattcgcgccagttcaccgcgccaccatccaccaggcacagttcgccatcgacccgatgcccgaaggcgctttcccagtgctgcaggcgctcgaccagcaggttggcctggcgcgcgtcgcccacctgccacagcaggtcgatgtccgagcgtgcgtgcacatagggcagaccgctgaggtgctgccaggcgaaggcgccgaacacgcgggccggtgcaagccgcagcattgcctgcagtgccgcctgccagtcagccggaacgccgccggcgagaatctgatccagggcagggggaggctgcaggtgctggatgtcctgcagggccacgcgcagcgccagccgttgcttgccttcgcctagcggtagcggcacccccaggcgcagtcgcgggtcgggatcatccgccgcactgcgtgccaccatcgctggcaacccctgcgcaaaccacgccgccaggcgcggttcgtgcgccgtcaggtcagcccgccagtcggcatcggccgacagccaggccagcgtgtggcgggcgggccgctcaggcatcgccgtgggccaccgcagtcgaaaccccggccgccagggcacgaccgccgcgctgagcgccgcgtgcagcacgtcggtcgccttcggcgggcgtgcgcagggcctgcagcaggcgctgggcaaggtcgccttcccatagtgattccaccgcacccatcgccacgtagttggccacgcccggcgcgaataccggcgagctctggctgagcgcctgcagcttctccagcggttgcttagtcacccgtgccatcgcgcgcaggtccatcacccgcacctgtgcgtcgggcagggcgtggatgtggtcggccatcaggccgaatgacaggaagccaccgctgaccgattcgccgtagaccagggtgaccaggcgcgcaccacggcggcgtgccagatcgagcgtctgcgcgagatgcgcaaagtaaccattgatgcccaacagttcgtcgcgccgcgccaggcgctgtccggcggtatccaccagcatcacgatcggtcgatgtggatgtgcgccggtgctggcaagcacggtttcggccagtgccagtgcgtggtccacgccgacttcaagtttgtcggcggtaccgatcacggtcacctcgccatcctcggtggtggcgctgccggtcagcaccgaatcgttcaccgcaatggcatgcccatgcgggaacagggcatcgagcaggttctgcaacggcatgttcatggcaggctccggtcggcggtggcgatgaggaactcatcggtgtcgagcagcggtagtcgctcgggggctgcgatgccttggcgggcccagatctccaagccatcgcggcaatcgccccaggcctgcacgcgcgccttcaatgccgcatggcgttcctgcagcgcagccagtgcagtatccggatcggtgctactggtatcaggctgcagcgcgttgctggccgcctgcgcgaaggcctcgatggcatcgggcaccagcacctgtgcttggtcgatcaggtagcggtgcttgcctcccgttacgcgccagaccagcgcgcgatcgcgggaatcgaactcttccacgccgcgcacggtttcgatcacttccgggccggacagcgacaggcgcccctcttcggacatgatgaccgtgctgcagcagcgggcgacgatgcccatgccgccgaaggcgccgttgccgctgccgatcagcgcgatcaccggcacacccgctgcacgcgcgtccagggtggcgcgcatgatctcggaaatggcgatgagccctgcattggcttcgtgcaggcgcacaccaccggtgtccagcagcagaagcacgccttcgggatgtgtttcggctgcgcggcgcagcagcccggtcagtttggcaccgtgcacttcgcccacgccgccgcccatgaattcaccctgctgcgcggccagcagcacgcgtcggccacgcagcgtggcttcgccgacaacgatgccgtcgtcgaacgccgcgggctggtcgagctgtgccaggtgcgggctcatcatccgccgcgccgggccgaggaattccctgaaggaaccggcatcgaccaggctggcgatacgctcgcgcgcatcggcttcgtagtagctgtagcgctgcgtccggttcatcgtggatctccagcacgcagggtttccacggcctggtccaggcgcaggctgactaccgccggggtcgcaccggcatcgttgatcgagatgcgtacatcgcgcagcggatgacgctgtgcgaagtcgctgatcaccgcttgccacacgctgccgaaacccttcgcggcggtgatgatgcgcaccgtcatcgcgccgtccagtgcggccggctccagcaggatttccaggttgcccgaggccagcacgccgaccagcaccgcgtcgcgcggaaactgcaccgcagtgtgcccttcgaatcgatagtcgagggtttccatgctcagccccttaccagttgcggaagcgcttgggcgggtcgtacagaccgccggaccagcgcaccaggtccttcaccgaacgcgccgccagcaggtcacggctggcatcgcgcacggagatgccaaggtcgtcgggacggcggatcacgccgcggtcgcgcaggttttccaccatcgcgcggtcgcggcccaggcccacggcggtatagccggccacgccacggatcgcctgttcgcgctcctcaggggtgcggcacagcagcaggttggcaatgccttcctcggtcagcacatggctgacgtcgtcgccgtagatcatcaccggcggcagcggcatgttcgcgcgttcggccagttcccaggcatcgagccgctcgacgaaggccggtgccatgtgctcgcggaaggtttccaccatctgcaccaccagcttgcgcccgcgcggcatctcgcccgggcgcgcggcctgctggccggccttgatccaggcctcgctggcatggcggcggccgcgtgcgtccgagcccatgttcggtgcgccaccgaagccggcaatgcggtcgcgggtggcggtggagctgttgccctgcaggtcgatctgcagggtggaaccgatgaacatgtcgcaggcatacaggccggcggtctgcgagaacgcgcggttggaacgcatcgagccatcggcgccggtgaagaacacatcgcctcgcgcggcgatgtacttctccatgcccagttccgaaccgaacgaatgcaccgatctgacgaagcccgattcgattgccggaatcagtgccgggtgggggttcaacgcccagtgctggcagatctttcccttcaggtcgagcgattcggcgtaggtggggagcagcagttcgatggccgccgtatcgaagccgatgccatggttgaggcggttcacgccgtactcggcgtagatgcccttgatcgccatcatcgccatcaacacctggatctcggagatctgcgccgggtcgcgggtgaacagcggctcgatgtggttcggcttcggcgcctgcaccacgaagttgacccagtcagcgggaatgtcgacgcgggggagggtgtcgacgatctcgttgacctgggcgatgacgatgccgccaccgaaggcagtggcttcgacgatcaccggcgtgtcttcggtgttcgggccggtgtacaggttgccgtgccggtctgcggcctgcgcggcgaccagggccacgcgcggggtcaggtcgatgaagtagcggccgaacagttccaggtaggtgtggatggcaccgatctggatgcgcccttcagccaccaggttggccaggcgcaccgactgcgggccggagaacgagaagtccagcttcgaagcgataccacgctcgaatacatccagatgcgagggcagcgacagcaccgactgcaccatgtgcaggtcgtgcacgcgggccggatcaagatcggccagggcctgggcgaggaaatcggcctgcttctggttgttgccctccaggcagaccttgtcgccgggctccagcagtgcatgcagcagctcgcctacgtcgccggcggcgacctcgcgtccccgggcccacggcgcggcacgttccaggcgggcctggcgactgcgttccaacgtatcccagctcgggttcattgaccggcttccgacgggtgttggaataattacggcataattacggcgtagggtgcaacctgcagtgcagcaaaaggaaaggcccgcacggagacgggcccattcaggtagcccacgaccgtggtcgtggcggagggcgtgccgaccaacggtcggcacccaccttgcacccgtcgtttgctcagaacttccagcgcaggctggccgacacgaagcgcggctcgccgaagttgttgtagtccaggttggcccagtaggtcttgtccagcgcgttgcgcacgctcagcgtcgcggtccagttgtcgctgatgcggtagttggcgttgaactgcaccagcgaatacgccggctggttcaccgtcaccgtgccgccgagcgggtaggcgatgttgtagccctgcacccggctctgccactgcaggccaccgccgatgctcagtcgctccagcgcgccgcgcagctgcagctgggtgttgagctgcagcaggtccttgggcggattggcgtacagcaggtcggtggcggcgcgggtcaccttgacgcgggtgtagccggcattgaccgtccagcccggcaggatctcgccgttgacgtccatctcccaaccgcgcgccttggtgccgttgatgccgatataggccgagctgccgtcgctcagcgtaccttccggcacgctcatgtcacgcaccgcgtagttgtcctgcttggcctcgaacaccgccgcattggcggtcaggcggccatcgaaccactgcgtcttgatgcccgcttccaggttcgagccctgcaccggtgccagcaggttctcgttgcggtccttgtagttttgcggattgaagatctcggtgtagctggcataggccgacacgttcggggtgatctcgtagaccaggcccacgtacggagtgacctcatcgctcaccttgtatgcaccgctggtgccggtataggcgccggcagcgttgtacgagcggctgagcgtttcccagcggctcaggcgcgcaccggcaatcagcgacagcggctcggccaggcgcaggcgggtggccaggtagacgccgctctgcgtggtcttggccacgcggcgtgcgccggtgcgggtgtaggtcacctcggagatgtcgccgttccagttgaacacgttggggatgtagtagcagcgctcacgcccgcaggtcgcccagtcgcccgggaagttcagcgccacggtatgggtggtgccttccaggtccgaccactgcgcgccgacggtgaggtcgtggtcgcggccgaacagcgggaagctgccggtcaggtaggcatcgacattgcggcgggtgtccttcgaatcaccggcggccgcgcgcaggtagatgcccgcgccggtcaccgggtccgggttgccggtgccgtacaggcgcacgttctgcacgttgccgcgggtgtaggcggtgttgatcttcagcagccagtggtcgccgaaacgctgttccaggttggcgaaggcggtattgctttcgcgcttccagtagctccacttcggcgacaggttggtcgagcgcgccagatgggcgaagttgccctggttgtcgaagaacgccacggtgccccaggtcgaaccggtcgggttgttgtcctgggtctggtagccgacggtaaccgtggtgctgtcggtgacatcgccttccagcaccgccatgccggccatcttgttttccttgtagcggtcgtaatacaggccacgatcggtgtaggcggcgaccacgcggctgcggaagcggccgtcggcggtcagcggcgcggttacgtcggcttccatgcggcggtagtcccagctaccggcgctgaccgcgaacgacgcgtcgaattccttgccggggcgcttgcgcagcaggttgaccgtggccgacggcacgccggcgccgctgagcaggccgttggcaccgcggatcacttcgatgcggtcgtagaaagcggtgtcgtactcctggttggtcgagccgctgtaggtgggaatgccgtcgacctggaagtcggtgatggcgaagccgcgcgcgtagtacagcggtcgttgcgtgtcatagaaggacacgctgacgccggtcacgttgcgcatcacgtcattgatgctgaacagcgattcgtcctgcaggcgctgcaggctgatcgcggtggccgactgcggggtttcctgcagggtgatcggcaggcgcgtggtactggccggcggcgccgactgttcggcacgcacgctcacccggtccagggtcttggcgtcggctgcgccatcagtggcggcgaacgcgctgggcgtggccagcagggtcaacgacgaaagcagggcggccggcagcagcgcgcggcggggcaggcggttatcgaaggtcaggcacatggtgggctcgaagcgtggaggcggggaggggcggcaacagtcgtccagcacccggggcggcggcttcgggcacggtcaggtccgtctggggcgaggcgcggtcactgcgcaggacgcaaatgtaaataattcttaacaacattacaattcgcgtcattgtgcgcaggcttcccggcacggggcatcgctttctgtagagccgagccatgctcggctgctttttgccggagccgagcatgggctcggctctacaggcggtagcctgcccaaacgcaaacggccacccgaaggtggccgtccgtctgcatcgaaaggaacctgcgggcttacagcgcctgcagttcctcgttggcgttgcgcttttccttggccggcgccggaaccgccgccggagcgggcgatgccgcgttcgcgtccaccggcacctccaggtagggcagctgcagggtctggctggtcagcgtgcggatctcgttgaccagcgcggcgctgtcgttgagcttgcgcccgtacgacggcacgatctcgcgcaggcgggtttcccagccggccttcatctgctccgggaaggccttggccatcaggtcaagcatgatcggcggcgaggtcgacgcgcccggcgacgcgccaagcagggcggcgagggtgtggtccttgtcggtcacgatctcggtaccgaactgcagcaccgggcccttcagcggatcgcgcttgatgatctgcacgcgctggccggcggtgaccagcttccagtcacccggcttggcattggggaagtacttgaccagttcggcctggcggtcggcatcgttcaggcgcgcctgtcccatcaggtactgcaccaggtccaggttgtccttgcccacttccagcatcgggccaacgttgttgtgggtgaccgaggaatacaggtcccaccacgagccgtgcttgaggaacttggtgctgtacagcgcgaacggcccgaacaggaccaccggcttgccgtccagcttgcgtgcatccaggtgcggcaccgacatcggcggcgaaccggtttcggccatgccgtaggccttcaccccatggcgcgatgtcacgccctggccctggaaggcgaggaactggccgccgaccgggaagccggcgtagtccttcgattccggaatgcccgacatctgcagcagcttcagtgcggcgccaccggcaccgatgaacacgaagcgggcgtgggtggtggattcggtgccggccttgaggtccttcaccgtcacgttccagctcttgtcggcgttctgccgcagcgcgctcacttcatggttcaggtgcaggctgaagttcgggctgcgctgcaggccggcggtcagctggcgggtgatcacgccgaagttgacgtcggtgcccagcggcatccaggttgcggcaaccttctgcttcgggtcacggccttccatcagcagcggggcccactgcttgatctgggccggatcctcggagtactgcatgccgtagaacagcgggttcttgaccagggcctgctggcgcttgtgcaggtaggcgatgttgtcatcgccccagacgaagctcatgtgcggggtcgggttgatgaagtcgctgggctggctcagccggccctccttcacctggtgcgaccagaactggcgcgagacctcgaacgattcggcgatgccgaccgcgcgcttggtctcgatgctgccgtcgggcagttccggggtgtagttcagttcggcgaacgccgagtggccggtgccggcgttgttccagccatcggagctttcaccggcgacgccgtcgaggcgttcgtagacctggatgttccagtccggctgcagctcctgcaggtaggtggccagggtgatgctcatgatgccggcgccgaccagcacaacatcgacgggcttgtcgttgctggcggcaggcaccgagcgctgggtcagcggccagtacaggaacagcgcggcggccagcaacagcagcacgagcagggcgagaagagccttgccaaatttcttcatgggggcgggatcgttggcggaggggaaggggtcaggatgcgcgtggggcagggaaagggcgtgaagaaacaacgccttgcatcatccaccgatgattctaaccggatccggtccttttttgatgcaacgcagcatccgacgtttcgcggcgctgccacatgggcggcaggcgatgcccggcgacagtgggatcagaccagttcaaggatctcgtcgccagcctcatcgaccccgccggtcgggcgccagcccaggcggcggtagaagccgtgcgagcgcgaacgcgggtcggccgagcaggccaggaacagccgccggtggccggcatcgcgggtcaggctgaccacttcctgcagcagctggcggccgatgccgcggccctcgtagtccggcagcagggccagcaccagcacctcgccgctgtcgcggtcggcgaagcagtagccggccatgcgctcgccctcccaggcgacgcggccgatcgaatcgccctgggcgatgccggccgcccagctgtccacagtgatgcccagctgggccagctgctcggcgctgaaggcgttctcgcgggtgcgcccacgcaggtcgatgcaggcagcggcatcctcggggcgggcgtcgcgcaggtacacgggcatgccggacatccttgtaatggtcggcccgccagtatccgcatcgcgcatggacccggtgtgtaggcttgatggagatccgatggagccccgaaaaaggggacggaggggattaagccgtatttgccttggatgtcgtattggccttaagcgacttaatcccctccgtcccctttttgcgctgtgcgtcagcgcttgcgccggatcaatgccgaggatgcatccagcacggcgcgggtcagcagggccatggtctgcacgtcgcccttccagtgctgccagtacagcggcacgtcttcccacgcgcgctggcgtacgtagaccaggcggccggcgtccaggtgccgcttgaccagcggcaatgggttcatcgtccagcccatgccgcccaggttggcctgcacgaaggcgcgggtggagggaatccaccaggtcggtgcggtgctgggcaggtcatcgccggccatgcgccgggcgaagcgcgactgcatttcgtccttgcggttgaacaccagaaccggtgcctgcgccagtgcctgcgcggtcacgcccttggcgaagtagcgttcgcggaactcgggggtgcaggtcgccgcgtaacggatgctgcccagcgcgtggatctggcagccctgcaccggctcgtccagcgtggtcaccgcacccagcaccgtgccctggcgcagcagttcgacggtgtggtcctggtcctccacgcgcaggtccagagtggtcccggtaccctgcgcgaactgcgccgcggcctgcggaaaccaggtttccagactgtcgtggttcactgccaccgggatgctggcctggggcaggtcctcgtcggccaggcccatgcggtgcagcgcatcgtgttccagcagggcggtctgctcggccagctgcaccagcaactggccctcggcggtcgcggtggccggggtgccacgcttgaccagcaggcggccgatccggtcctccagtgccttgacccgctgcgagatggccgagggcgtgacattcagcgattgcgcggcgcggtcgaagctgccttcgcggatcaccgcggccagggcgcgcagctgggcgtgatcgatgcgcatcgaattaagctccgctaatgttggtttaggaagtttagctcgtctttttcatgttgcggcgcgacaatggcgcccgttccggtgctgtccgccttcgcgaggcaccgtcccccaagcaatacaaggcagtgaatcccatgttctcggtcatctccgccagcaccggcctcggtgcctggttctctggtgcagccaccggcatcggcctgttcgccgtggtcggggcccagagcgccttcattctgcgccagggcatcctgcgcaagcacatcgtgccggtggtcgccacctgcgcggccatcgatgccatcttcatctttgccagcgtggccggcctgcgcacgctcacttcagcgctgccgtggctgaccaccgccgtgctgtggaccggtgtcgcgttcctggcctggtatgcgatgaagtcggcacgccgtgcgatcgccggcggcggtggcatgggcgaggccgacagcgacgacggcagccgccgcgcggtgctgatggccgcggtcggcttctcgctgatcaacccgcacttctggctggacatgatggtgatcggctccatcgccgagaacttcggcaatgcccgcatggccttcgctgcgggcgtggtcacggccagctgcctgtggctgaccgcgcagggcctcggcgcacgcctgctggcgccgctgttcaccaagcccagcacctggcgcgtgctcgacggcaccatcgccgtgatcctcagcatcctggccctcatgttggcggtgcgcggggtccactgacccggcgcacgccccccgaacccacgtcctgactctctctccaaggtagtggcaacgacggcaccggcaacggtgccgtcgtcttttccggctctggcgggaaacccattgccctgcctagaatcggagaccaggacaaggtgtccacaggagcaggggaaggatgcacaggacgattctggcggccgcactggccgtcatcgggggcgttgccgcaggcagcgcgggggcggtggagctgacgcagtacctgcgccgggagaccttcaccgacatcaagatctcgccggggggcgagtacgtagcggcaacggtgccgagggaggacagcaccgcgatcgcgatcctgcgcctgaaggacaaggaggtggtcggcagtttctggccgcccagccgcaaccacgcgcaggaattcgattgggtcagcaacgagcgcctgttgatcggcctggcccagaagtggggctcgctcgaccaacccaatcccaccggcgaactctatgccatcgacgccaacggcaaccgcggcgaactgctggtcggctatcgcgtcgaaagcaagggcccggggacccgcatccagccgaagaaggtcgaagcagtggccgccttcctggccgacgacctgccgggcgacgagcgcaacgtgctggtgaccgtatggccgctggccgaggatccgtacacccgcgtagatcgcatggatgtgactacgggtcgtcgctcgcgggtggcgtcctcgccggtacggcgcggcgagttcaccaccgacggcgccggcgaagtgcgcttcgtgcatggctcgggcagcgacaacatcaacaagctgtacttccgcgaacgcagtggcgacagctggaagctgatcaacgacgaggccgtcagcaagcgcatcgaaaccgccctcggcttctcggccgatgacagcctggcctacctcaacgtcgagcagacccagggcccggacgcgatcgtcagctggaacccgcagaccggcgagcgtgccacgctgctgcgcgacgaggtggtcaatccgtatcggatcatccatcggcccggcacccacgtgccggtgggcgcgctctatctcggcgatacgccgcgtacccggttcttcgacgagaagtcgccggaggcgcgcctgtaccgcagcctggaagccgccttcggagggccggtctacatcacctccagcacccgcgatggccgtgtcgtgctggtggaaacctggtcgggctcgaacccgggcgatttctacgtctacgacacggtggcgcgcaaggctgaccacctgatcagccgcagcgactggattgacgtggaccgcagtgccagcgtgaagccgattgcactgaaggcgcgggacgggctgccgttgcatggcttcctgaccctgccggccggcagcaacggccgcaacgtgccgatggtggtgatgccgcatggcggtccgttcgacatcttcgattccggccagtacgaccgcgaaacccagatgctggccgccgccgggtatgcggtgctgcaggtcaacttccgtgggtcgggcaattacggccgggcccacacccaggccggtgcgcagcagtggggcgcggcgatgcaggacgatgtcaccgatgccacccgctgggcaatcagcgaaggcatcgccgatgctcgtcgcatctgcatctatggcgccagctacggggcctacgcggcgatgatgggggccgcccgcgaacccgggctgtatcagtgcgcggccggctatgtgggggtctacgacctgccgatgatgtacacccgtggcgatattcaggaccgcggctcaggcgtgacctacctgcgcgaatggctgggtgatccggccaagctgggcgcggtgtcgccggtgaacctggccgaacggatcaaggtgccggtgttcctcgcggccggtggcgaagacaagcgtgcgccgatccagcataccgagcgcatggaagcggcgctcaagcgcgccggcacaccggtggaaagcctgtactacaagaccgaaggccacggcttctacaccgaggcgcatcgcagcgagtactacgacaagctgctggcgttcctggcgcgcagcctggggggcaagaccgcgacgaccgcgcccgtggccggcaaggacaaggcgccctgagctgacagggcggcggatgaattttccgccgccctggtcttccgcacgcgggacttacttcaccccgtgcatcatcttcttcagcagcggcgcggcgatgaaggccgccaacgcgcaacccaggccgatccacatcagcagccagaacaggtgcgcgtaggcaccggcggcagccaccatgtccagcgattcgccttccggcacctcgatcgcggccagcttgccgaacagcgcggccagcgtttccgagaatgcggtggccaggaaccaggtgcccatcatcaggctcatcacccgcggcacggccagctgggtcaccgccgacaggccgaccggcgagaggcacatctcgccgctggccagcaggaagtaggccagcaccagccaccacacgctggccatctcgccggtggcgcccacctgctgtgcggccagcgccagcggcacgaacgacagcgcgccgatcaccaggccccaggccgacttcaccggcttgcccggttcccagccgcggcggtccatccacgtccacagcgcggcgaaggccggagcgagcagcaccaggaacaggccgccgaggtaggtcagcgagccggcggtctgcggaatcaccaggcagtcgcgcaccagcagcaccagcatcagtacgacgatggcggcgaagaacgtgcgcggcgcggccgagcccgggcgccgttccgacaggcgcgcgctgaccacgaagccgagcggtgccagcagcagcgagaggatcgaccacggcagcggcgtgccgccggtgatcaccagcgagggcacgatgtccttggtcagcaggcggtcggtgaaggtcacccacgagccgtaggactgctcgtacatcgtgaagaacaccagcgccatgaagatcagcaccatcagcgcgatcatctgctggcgctgcaccggcgtgcatttcgtgccggtgaaccaggcgaaccagaccagcacgccccccagcaccaccagcatcagcatcagcgccaggctgatctcaccgcccagcgcgaacgcgccgttgccggcggcccacatcagccatgccaccggcagcacgccgagcaccgcgcacagatagatgagccattcgcgtggcaggcccagcaccttctgcttcagcgccgccggttgcggcggttcggcatggccctgcaggtacttctggccccacaggaacatcgccaggccggccagcatgccgatgccggccgcaccgaaaccgtacttccagccgtaggcctcaccgaggaagccacacaccagggacgagaacagcgcgccgaggttgatgccggcgtagaacagcgaaaagcccgagtcgcgacgcgggtcgtccttggcgtacagcttgccgacaatggtggagatgttcggcttcaggaatccgacgcccatgatgatcagcgccagcgacaggtaggtcaccgccagcgccgaggtgtcgcgcaccacttcgccgttcacccggtacgcggcgtggccctcgaaggccatgccgaggtggccgagtaccagcaggatgccgccgaacagcactgcccggcgcatgcccagccagcggtcggccagcatgccgccgaacaccgggatgcagtacaccaggccaccgtaggcaccgagcaggtccaggccggccttgtcgccgaacaggtggtatttggtcaggtacagcagcaacagcgccttcatgccgtagaaggagaagcgctcccacatttcagtgaagaagcagacgtagacgcccttggggtggcccaggaagtcgtcggaagcagaggcggcaacggtcatcgacggcggggacagcggaaagggcgcgattataggcctctgggcctgggcaggcagccgccggtggatccacgccatgcagggatggcgctcccccggcgggcaccgctcacaggtatcgcaaccaaggcagatcgcgccttcgcgctttgaaccgcgcgaaggcccgcgtcggcgggtacagcaccaccgccagcgcacaggccaccagcagcaggccgctgaccgaatccagggcatacagttcgccatgggtcggcccccaggccgccaacgcggccaggtacagccctttcagcacgtacaggtgcagcaggtagaagaacatcggcgcggcgccgatatcggacagcgggcgcagcgcacgcgcgaggggcggccattcgtacaagcgcagcagcaacagccccacgcccagggtctgcaacaggaactgcaatgacggcgggtacttggtgacgttgaagatgctcaaccacgtgcgcagcgtagtggtctggtacgaccagggagcatccccatactggttggcgaaccgcagcagcgcgaacagggccagcgcgccgacgcctgcccacagcagccagcgctggcgctgctccggcgcgcgcgcgcggccgaaccagggccccatcagataacccagcgcaatcaccccgatccacggcagtaccgggtaggaggtgcgcaggcgcagcgcgccggcctcgatccagtcgcgctggtgcagcactttccacagcaccgccagcaggccgtttccttccacccgcacaccatccagcaggttgtgcccggccaccaccgcgaccgcgaccgccagcagcacggggcggggcagccacagcagcccggccagcgcgatcatgctcagcccgatggcccagatcacctgcaggtacagcgtttccggcggcagctggaaggtccaggcgaaattcaccagggtcagttccagcaccaccaggaacagcccgcgcttgagcaggaacgcagctgtggccccgcgcggatccgcctggcgctggccgtacagccaggccgacagcccggtcagcagcacgaacacgggggcgcacaggtgggccagcagacggcaggcgaacagcgcaggggagaccgtcgccgcgtccatcgggtcgctcacctggtgctgcaggaagaaggtctcgcgcacgtggtccagcagcatcaacagcatcacggtgccgcgcagctggtcgatggaggccaggcggggggagggggaaaggggcatgcgatgcagtaacaacaaggtatcattaagatataacatatcatttacggcgtgcccagccggactttgccgggtcggtcgattgccggtccacgtaccggcccattgcgccgcagcacacgcccccatcctttggcacgctggacttgatctgccctgaacgctagcgtggcagggattttttgccagcaggggcttccatgaaccacgacgctgcgcccaagcagctcaccttccgcgcagtggccctggccatcgtgctggcggtggtgctgtcggccgcaaacgcctacctcggtctgttcgcaggcctgaccatcgccaccgccattcccgccgcggtgatttccatgggcgtgctgcgcctgctgggcggtggctccatcctcgagaacaacatcgtgcagaccggcgcctcggccggttcatcgatcgccgccggtgtgatcttcaccatcccggcgctggtgatcatgggctactggccggacttcaagtactggtgggtgctgggcatcgccggcctcggtggcctgttgggcgtgctgttctcggtgccgctgcgccgttcgatgattgtcgaagacccgctgccgttcccggaaggcaaggctgcggccgaagtgctcaaggccggtgagaacccgggcccgggcctgaagatcctcggcctgtcggcggtgatcggtgccttcgtcaagctggccgcggaaagcggcatgcgcctgattcccgatgcctgggccacctcggcctacgtcggcagttccaaggtcaccgccttcatcggcaccaacctgtcgccggcactgctgggcgtgggctacatcgtcggcctcaacgtcggcatcgtggtggtgtccggctcgatcctgacttggcacattgccatcccgatctaccaggcgttcttcatgaacaccgacccggcgctggccgcgtcggttgccgctgcctcgtccaccgaggccgcgttcgccatctggggcgcgaagatgcgctacctgggcgtcggtgcgatgctgatcggtggcatctggaccctgatctcgctccgcaagtcgctgctcaacggcgtcaagagcggctttgccgccgcccgcaagagcggtggcccggtgctggcgcacaccgagcgcgacctgccgatgaagtggatgctggtcgccctggtggtgttcgtgctgccgctgctggccctgtaccaggccatcgtcggccagtggcacgtgtccatcccgatgaccctcatcatgatcgtcgccggcttcctgttcgtttcggtctcggcctacctggctggcctgatcggctcgtccaacaacccggtttcgggcatcaccatctccaccatcctgttcgcttcggccgtgctggtggtgctgctgggcaaggatggcctgcagccggtcggcgccttcggcgcgccgctgggcgcggtggccgcgatcatgatcggcgcggtggtgtgctgtgctgcagcggtcggcggtgacaacctgcaggacctcaaggccggttacatcgtcggtgccaccccgtggaagcagcagctgatgctgggcatcggtgcgttctcgtgcgcgctgatcatggccccggtgctgaacctgctggccaccgcctacggcatcggcgtgaagtcggagctgcacccgaacgcgctggccgcgccgcaggccaacctgatggcctcggtggccaagggcctgttcggtggtgaactgccgtggaccttcatcggcatcggtgccgtggtcggtgccgccatcatcgcgttcgacagctggctgaagtcgcgcaacgcccgcttccgcgtgccggtgctggccgccgccatcggcatctacctgccgctggaactgatggtgccgatcttcctcggcggcctgatcgcctacctcgtcgagcgcttccacaaggtgcgtgccgatgacgaagaaggtcgcgaccgcgtgcacaagccgggcgtgctgttcgccgccggcctgatcaccggtgaggcactgatgggcatcgccatcgcgattccgatcgtggtgagcagtcgcgccgacgtgctggccgtgccgttccacctgccgggcgcacagtggatcggcctggccgtgctgttcctggtcggctggctgatctaccgcaccggcaagcgcgccatggcgtaagggttggggtcggatcccttcccgcagggaagggctctgaccccgggttgacagcgtctggggtcagagccgattccgtcggaatcggatccgaccccggtgtccccacaaaccgcgccacggcgcggtttgctttttctggcggcggggccgcgccccaccggcagccatgaccgatggccttggcagccccggccgcacgggcctaccatcggttttttgccgtcctgcggagaccccgatgaaactgcgtcatgccctgctgccactgagcctgctggccgccctgcccagcgtcgccgctgcccgtggcctggaagtccgcgacatggtggccatggaccgcgtctccgcgccggtactgaccgctgacggcggcaccgtggtgttcgccaagcgcagcgtggatgccaacctgaaggcctccaccgcgctgtacgcgcgcaacctgcgtacccgcgacgcagcgccgccgaagcagatcaccccggccggctggaacgtcaattccgcttcgctgtcggccgatggccagaccgtgtatttcctcagcgccaggaacggcagccagcagttgtacgcgcagccggtcagcggcggcgccccgcgccagctgaccgacttcccggtcgacgtggacagctaccacgtgtcgccgcaggacgaccgcgtgctgttcagcgccggcgtgttccaggcctgtgcctcggacctgacctgcaccgagaagaagctcaaggacgtcgccggcgccaaggccagtggaaaggtcttcgattcgctgttcgtgcgccactgggatacctggaacgacggccgccgcaacaccctgttcgtcgcgccgctgccggcagccaaggccggtccggtcaagggcgcttccgcgctgagcgccaccatcgacggtgatgccccgtccaagccgttcggcggcaatgatgatttcgcgtggtcgccggatggcgccagcgtggtcgccagcatccgcgtggccggcaagcaggagccgtggtcgaccaacttcgacctgtaccgcttcgacgcggcgggcaagcaggcgccggtcaacctgaccgcctccaacccggcctgggatgccggcccggtgttcagtgccgacggcaagaccctgttctaccgcgcgatgaagcgcccgggcttcgaggctgaccgcttcggcctgatggcgatggacctggccagtggcaagacccgcgagatcgccccgcagtgggatcgttcggctggcggcatcaccctgtccgccgacggcgccagcatctacaccactgccgatgacctcggcgaacacccgctgttccagatcgacgtggccagcggcaaggccaccaagctgatcggcgacggcagcgtgacctcggtcgatgtggccggcaacagcgtggcgatcacccgcaacagcctgaagagcaacgaccaggtgctggttggcttgctgccggccgcgggcgaagccatcggcgagctgcgcgcgctgaccccggccgctggtgaggtgctcaaggatgtcagcttcggcgactacgagcagttcgagttcaagggctggaacaacgacaccgtgcatggctacgtggtcaagccgcacaactaccaggaaggcaagtcgtacccggtcgcgttcctgatccacggcggcccgcagggcagcttcggcaatggctggagctaccgctggaatccgcagacctacgcgggccagggctatgcggtggtgatgatcgacttccacggctccaccggctacggccaggcgttcaccgatgcgatcagccagcactggggcgaccgcccgctggaagacctgcagaagggctgggatgcggcgctgaagaagtattccttcctcaatggtgacaaggcctgtgcgctgggcgccagctacggcggcttcatggtcaactggattgccggcaactggaacggcccgttcaagtgcctggtcaaccatgacggcgtgttcgaccagcgcatgatgggctacgccaccgaagaactgtggttcaccgagtgggagcagggcggtacgccgtaccagaaggcggcgaactacgagaagttcaacccggtcaaccacgtggcggactggaagaagccgatcctggtcatccacggccagcaggacttccgcatcccggtcgagcagggcctggccgcgttcaccgctgcccagcgccagggcatcgaatcgaagttcctgtacttcccggatgaaaaccactgggtgctgaagccgaacaacagcatcctgtggcatgacaccgtcaatgcctggctgaagcagcacatcggcaactgatggttgcggcgccgccctccggggcggcgcttctgtttcaccatctgctttaccggtgggtgccgaccgttggtcggcacaccttcctgatctgccgccaccagcagccggccagcggccggctctaccagagcgcctgcatgccttcgactgccctgatccagaacgacatcgtcgtcttcggtttgatcgccgccactcttggcgccgtgttctggaccgcctcgcgcgagcaggggctgtggaagcgcttctatacgttcgtgccagcgctgctgctgtgctacctgattcccggcatctacaacaccgtcggcctgatcgacggccagaacaccaagctctacaacccgatcgcgcgcgacattctgttgccggcggcgctgatcctgctgaccctggcagtggatatcaagggcatcctgcggctcggcccgaagctggtactgatgtacctgggcgcctcggccagcatcatgctcggtgcggtggtggcgttcctggtgatgcgcgcgatccatcccgacaccgtggccggcgatacctgggccggcatggcggcactggccggcagctggatcggtggtggtgccaacatgctggcgatgcgcgaagtgttcgacgtcaacgcgaccacctttggccagttcgcggtggtcgatgtcggcgtcggttacgtgtggatggccgcgctgatcttcctggcaggacgtgcagcgaagatcgatgcacgcagtggcgctgatacctcggccatcgatgaactgaaggagcgcatcgcgcgcttccaggccgagcacgaacgcattcccagcctgaccgacctgatgctgatcgtggcggtggccttcggcggcgtcggcctgtcgcatgcgatcggtgcgccgctggcggcctggttcaaggccaacgtcagctgggcgtcgcagttcagcctggacgcgccgttcgtgtgggtggtggtgctgtcgaccacgctgggcctgagcctgagtttcacccgcgcacgcaacctggaaggggcgggtgcatcgcggctgggttcgttgctgctgtacttcctgatcgcctgcatcggcatgcagatggatctgctggcgctgctggatcgcccgtggctgttcctgcttggcctgatctggattgccgtgcacatcgtgctgctgtggtgcctgggcaagctgctgaaggtgccgttcttctatttcgccgtcggttcgcagtcgaacatcggtggcccggcctcggcgccggtggtggcgtccgcgttccatccggccctggcgccggtgggcgtgctgctgggcacgatgggctatgccaccggcacctacctggcctacatcgtcggcatcaccctgcgcgcactggccgggcagggctgatacggcgacggggtgatggggtcagatcccttttgcgacgcaaaagggatctgaccccggttcccggtgaatcacgccaccggcaacccgcgttcgatcaaccatgccttcgcgtcttcggcgtcctgctcgaaccacgctttcgtagatcccagccgatacgtatacccccaggcatccatgtcggccatcagccgctggctgccgacgccgggcagctgcccggccagcacgatctgcaggtagcaggtcgcgtcttcctcggccaccgagtcggtggcatcggtatgcacctgcgcccgccgctccggcggcagtacgatcaggtggcaggcctcatgcagcatcgagtgcacgggcgtgtcatcgcgcacgtagacgttgctggcgatgatgcccgcctcgggctcgccccagtagctgccgggaatcggctcgccggcggccacgtggtgcagccgcaggccatgcgcggcgagcaggcactgcgcatcggcgaaggcgatgtcgcccacgcaggtgatgtccacggcggttgtcgtatcggtcatgcgggtcaggcagccccgcccatgcaggcacgggcggggcaggggatcagggtttgtccgggccttccggcagcgccacggagatgtccagcacatcgtgctggccatccttcaccaggtcgaccttcaccgcatcgacgtcgatgttcacgtacttcttgatcacttccagcagctcgcgctgcagcagcggcaggtagtccgggccaccacggtggctgcgttcctgcgcgatgatgatctgcaggcggttcttggcggtttcggcggtggtcttcttcgctttgaggaaatcaaacaggcccatgcttaccctccgaacagcttgctgaagaagcccttcttctcgacgttggtgaagcgcatcgggcgttcttcgccgaggatgcgcgcgacggcgtcttcataggcctggccggcagcggattcgacatccaggatgaccggctcgcccttgttggaggcgttgagcacgtcgcccgattccggaatcacgccgatcgccttcaggccgaggacttcctcgacgtcggcgatgctcagcatctcgccgctttccacgcgcagcggggtgtagcgggtcagcagcaggaaggccggcacgtcctggccggattcggccttgtgggtcttcgaatcgagcaggccgatgatgcggtcggagtcgcgcaccgacgacacttccgggttcaccaccaccaccgcgcggtcggcgaagtacatcgccaggaaggcgcccttctcgatgccggccggggagtcgcagatgatgtagtcgaagccgtcggcggccaggtccttcaggaccttgcccacgccttcctgggtcagtgcgtccttgtcgcgggtctgcgaggccgccagcacgtacaggttgtcgaagcgcttgtccttgatcagggcctgcttgagggtggcttcgccgtgcacgacgttgacgaagtcgtacaccacgcggcgttcgcagcccatgatcaggtcgaggttgcgcaggccgacgtcgaagtcgatcaccgccaccttcttgccgcgccgcgccaggccgcaggccaggctcgcgctggaagtggtcttgccgacgccgcccttgccggaggtgactacgatgatttcagccaaaggacttctcctggttctgcatgagtttggtgctgcgtcagtccagcgcagcgatcttgatctggtcctgttccagccacacctggacggccttgccgcgcaggttgtccggaacatcgtccagtaccttgtagtggccggcaatggccaccagttccgcatggaaatcacggcagaagatgcgtgccgcggtgttgccctgggcccctgccagcgcgcggccgcgcagggtgccgtagatatggatgctgccatcggcgatgacctcggcgccggcgccgacagtggccatcacggtcaggtcgcagttttccgcgtacagctgctggcccgaacgcacgttgcccagctgcatgcggcccggctgcggtgcagcggcgtcggccaccttggccaccggcgtcgccggagctggcttcggttcggcacgggctgcccggcgcggttccggtgcgggcggcggcggggccggttcgccctcggcacgctcgtactgcgcgcggaacttggccagcagcggcagaccgagctgctgggagagcaggtcgaccgcgctggtgccgtaggccagcgccaccggcagcaccccggcgctgcgcaggccggcgaccagcgcctgcgcggtggccacgtccggcacctggctcaggccgccgaagtcgaggatcaccgcggcgcggccgaacagcttcggggcgcgggtcacgcgctcgcgcatttcctgcacgagacgttcgacatcaagggtacggatgcgcaggttggcgatgcccacctggccgatcttcagttcaccggcctgttcgtaatcgaaattcaccgccacgctcaggtccccgtcggccgctgtgcctgcgccggcagctgccgggcgcgtgtccatgccacatccggcagcttgtcgccgtaggtctcctggacccatgggtagctgcacagttccttggccagcatgctggcgcgcacatcgacctgcggcatggtgttctggcccagctcgcggaagccgaagctgccgtggaagagcagggcggcatcggcgccatggtcgaggaagacctcgcaggtcatctgcgggtagcgcagctcggcgaagctctgcgcgtcggcgtagaacgcacgcccgacgccaccgccacgacggcggctggcgaccacgatgcggtcgatatagaagaacggggtgtccaggtgctgcttgaaccaggcgaaattgctgctgtcgtgctggctgtcgctgccgaagccgatcaggaagccggccaggttgccgtcgcgctcggcgacgcggaaatactcagcggtttcatagaacaggcgcaggcgggccgcatccaggggaaggatggccaggccagcgttgttgttcaaagccaggacggaatcgagctcgtgctcgcgcacgtcgcggatgacaatcgacattgtgactccgtggggtaacgcggttggtccatcaagggaccctgcgcacgattattgcatgcccggggtgggctgcggcatgaacaggcgaccgggcaggcatgacttccgtggggtgcggtgcgcaggcgcggcccgtagagtgctggcatgttgggagtcctcagccatacccgcgtcctccgcctggccggccttttcacctgggtcatggtcggcctgcccctggcgtactcgcagttcgagaacctgcacagccgcggtgacatgggtggctgggcgatcctgttgttcgtcgcctacctgtccttcggcacggcctactactggttgacccgtatcctgcgcagcgacagccacaccagctggctggaccgcggcctgctgctgttgctgacggtctcggcgctgggggtcagtttcctcagcggttcgggcctgggcagcatcctgatgatggtggccgccggggtcattccgtggatgctgtcggtacggctgggggtgctgtggctgctggtcagccagctggcggtggcgccggtctattacctgctgctgcgcttcccgctgttcgaagcggtgatgcagtcgctgctgtacggcggcttctccatgttcatcttcgtgaccagcctggttgcacggcagcagaccgaggcccgcgacgagcagcgccggctcaattcggagctgcgtgccacccgcgccctgctggccgagagcgcgcgggtcaacgagcgcacccgcatttcgcgcgagctgcacgacctgctgggccaccagctgactgcgctgaccctgaacctggaggtcgccggccacctggccgagggccaggcgctggaccacgtgaagcgctcgcacgcgctggccaagctgctgctgggcaatgtgcgcgaggtggtcagccagctgcgcgagaccggcgcgatcgatctggccgcggcgctgcgcccgctgaccgagaacgtgccctcgctggacatccagctggagatcgaggatccgttgaacgtggaagacccgcagcgggcccacgtgctgctgcgctgtacccaggagatgattaccaacgcggtgcgccacgccggcgcccgccacctgtggatcaaggtgtaccgtgaagcccccgaccgggtggtggtggaggcccgcgacgacggcgtcggcgcggatatggtcaatgtaggcaatggcttgcgcggcatgcgcgagcgcctgcaacaatgtggtggccagctgcagatcgaaacccgtcccggagaaggcttccggctgcgggcgacggtgccggcaacggtgctggtggcggcccttaccaaggttcctgaaggagtgcgttgatgattcgcgtctgcctggtcgacgaccaaaccctggtgcggcagggaatccgctccctgctggcgctcgacgacggcatcgaggtggtggccgaggccggcgacggccggcaggcggtcgagctgataccgcaggtgcgccccgacgtggtgctgatggacatgcgcatgccggtgatgtccggtctggaggcactgcaggtgctgtcgcggcaggaacagctgccgccgaccatcatcctcaccacgttcgacgatgaccagctggtgctggccgggctcaaggccggtgccaagggctacctgctcaaggatgtcaccctggcgcagctggtcggtgccatccgtaccgtggccgacggcggttcgctggtgcagccggcggtgacccagcgcctgctgtccggcctggagcacatgcgcaacgagttcgtcagcctggaccgcccggacccgctgaccgaccgcgagaccgagatcctgcggctgatggccagcggcttctccaacaaggagatcgccaattcgctcggcgtggccgaagggaccatcaagaaccacgtgtccaacatcctgtccaagctgggcgtgcgcgaccgtacgcgtgccgtactgaaggcgttcgaactccagctggtctgaagaaaatcgttcaagtacaaagacttgggtcgtagttacgggttcctgccaaggttgccccctacttgccgggtagcggtatgcgttacccttcgaattctttttccatacaaatacgcagccggcagggaaaccggtgcgccaatcccgataaacaatgcccgcgaagcctgctaggattggcgcttcgcttcaatcaacccggccgtgggatcggccccggagactctctgaatgacccgtattatcgagttcctgatcgccttggggatcgtggctggcctgttcgtcatcattggcgtatgtctgccgggcgagcgtcacatcaccgaaagcatcgagaccaaccgcaagatgacgatcgtgtacgacacggtcagcagcctgcgccgcttcaaggactggaacccgctggtactgcgcgatcccgccgttgaactgaagctgtccggcccggcctccggtaccggtgccaccctcgacttcacctccaaggacctgggcaccggttcctggaagatcaccgaagccgaagagaacaagcgtgttgtgatcgccatcgaagacgccaccaagggtcacgacaaggtcaccaccttcaacctggagccgaccggcaagggcggtcgcaacgtcaagatcacccaggactactcggtgaagtacggcttcgacctgttcggccgttacgccggcctgtatgtcagccgccagatcggcgacgacatcaagctgggcctgtcgcgcatcgccaacatgctcgcaaccgtgccgaacgtggactaccgcacgccggaagccccgctgaccgacctggccatcgttgaagtgccggccgagaacctgctggtggtcaacgccggcaacgtggaccgcggtcaggacaccatcaccaagtccatcaaggacaaccaggagtggatcaagcgcgtgatggaggccaatggccttgaagccgccggcccgttccgcatcatcaccaccgacttcggccaggagaagtacgccttcgacatcgcccagccggtgaagaagaagggtgctgaaggtgctgctgccgacgagctgaccgtcaagatcgacggcggcgctccggtcaagtacgtgcacgttgctccgcaccgttcggcgcatgcggcctacaccggccacatggcgggtctggacgtggcccgcaacggcctgcgtgcctgggccgtgacttcgggcaacgaagtcatcgaccgcccgtacgaaacctggaaggacggcatcgacaagtcgttcaccccggaagcgacctacgacatctactgggccgtcaagtaagcctcggcggacccatgtagtgttggacacgaaaacgcgccgctcattgcggcgcgttttttttgatccggcgcccggcaaggggcgctgcgcaaggagcccccatgttcaatctcgaacgtcgtgcacgtaagccgtccctgctcgcctgcctgggggcgctgctggccgctgcctcgatcggcctgtccgcctacgcctcgcatggcgtggccgatccgctggcgcagcagcacctgaacatggcggcgctgtacgcgttcgcgcatggtgcggtactggtggcactggggccacgcgcgcacggggcgatcgcacacctggcgctgtacgtgctgctgctgggtgtgctgttgttttcaggcagcctggtgggcggggcgctgtggcagtggccgacgcggatggcgccgatcggtggcaccagcatgatggccggctgggtggtgctggcgatcaatgcgttgaggcggtgacggcaatccgggtacagccgagcatggctcggcactacatgggggcgttgcgcggcagctgctgtagagccgagccatgctcggcttcgagcgaagcggcccgcttttggcttcgctctctcgttccattccgcgtgcgggcgccacgaggggctcagccgttggccggcctccagcaccagtgccagggttcgtagacgatgccgtgcgggttgtcgcgtgggtagctcagatggaagccatgcccgccggcatgcacctgcagccaggcgaacgcgtcggtggcttcaaatgattcctcggccggggcatcgcccggtgtgccgatgtccagcgcatggccgctgtggtgttcgctgaaccccggcgctgcattgaccttcaggatctccgtcacgctcaacccacgtgccagcttccgctcgaagatgcccagctggtaggcatggctgcggaagccggaaattgcgtcgagcgcgatgccctcccgtgccgcctgcaggcgcatccgccgccatccctgcgcggcgccacggcgcagccacagcgggcggccgaagcggtcacggccggcgaagtgcagcaggcacggttcgggctccagtggcaggccgctgtcgtcggcatagcgctgtgcatccaggcccagttgctgcaggcgttgctgcagcccggccagcggcagccactgttcctgcagcgcagcgccgaacggacgtgccgccgctgcatcgagcagcgccagtgcgtcctcggccccgggctcgcgcggcaggcgtggcaccagcgaatgcacgccatgcgtcgttaccgccgccaggtagcggccatcgcgcttgcgccgcagcacccactgtgcctgcgacagcaggcgggcatccaggttgcttcgtgcgcgcagcaggtgggcgggccacagctcgatggcctcggtattgatcagcaggggggcgcgtcgttgcatcgccgcagcttaccgccgaggcgccggtgcggccaccttgcgcagtgcgtccagcagcacctgcggccgctccaggctgagcagcagcgtgctgccatcgctgaccggcagggcgagaacgcgcgtgcggtcggtgaccagcgcgaaccccttgccgccgccctgcaggcggaagtggccggaatagaagcccggcatcgcatagccattggtcttgaaacgaatgccatagcggcggtcacgctgcaggtcgaccacctcggcctggtccagccgcagctgtgccaccggaacgcggcggcggtacatcgtcgagcgcacgtccagcacgtcgtcggccagttccacccggcggcggaagaacgccgcgcccaacccgatgccgagcgcggcgatcaccagcaggctccaggcggcactgccgcccatccggaaccagggcggcgacagcgtcacttcgatccagggcgccgtggccggtgccttgtacaactgcgcatacaggcaggccacgaaggcggcgagcaggggcagcacgatccacagcacgcgcaacggcgaactctcggccacctcgtactgctttggatcgctggcacccatggctcaggcctccttcttgaataccagcatcgccgggcgcatcggtgcggggatgatgatgttgaccagctcccagcccagttggccctggcggctcagttcgctctggatgtcctcggccttgagctggcccatcatggacgtcttgacctcgatcgtctggtagctccagcgcttgctcattccttgtcccccgaagatggcgtgggtttcggcaggcgtcctgccttgcgcagggcgtcgcgcagcacgtattcgatctgtgcgttgaggctgcgcagctcgtcgtcagcccagcgttgcgcggcggccaggacgtcggcattgatgcgcagcgggtaggctttcttctcactcatgcaagctcctggcggggtggtggggcaccccgttgcgagggtggttcagtacagcgaaccggcgttgacgatcggctgggtaccgcggtccgagcacagcacggtcagcaggttgctgaccatgtgcgccttgcgttcttcatccagctgcaccacgccgttcttctgcagttcggccagggccatttcaaccatgcccaccgcaccggccacgatgcgcgtgcgtgcggcgatcaccgcgttggcctgttgacgctgcagcatcgcctgggcgatttcggcggcgtaggcgagatggctgatgcgtgcgtcgatcacctgcacgccggcgtcggccaggcgttcggccagctcgttcttcaggtgctgggagatctcgctggcatggctgcgcagggccagctggccgtcttcgtgctggtcgtagggatagctggtggccatcgcacgcagcgcagattcggactggatgtgcacgaagctctcgtagtcgtccacgttgtagacggcctcggaggcgtcgaccacctgccagacgatcaccgcggcgatctcgatcgggctgccgtccagctcgttgaccttcagcttgccgctctcgaagttgcgcacgcgctggctgacccggcgcttggcaaagaaggggttgttccagcgcaggccgttgtccttcaccgtgcccacgtacttgccgaacaggctaaggaccgccgcctggttgggctggatggtgtacagaccggccaggatgaacacgcccagcgccaccagcagggcgcccagcagcatcagcagcaggctgggcgagccggtgctggccttggctgccacgcccaccacgaacagggcggcgccggcgaggccgacgagcagggcgccgaccagcgtgccgaggccgttgagggaagacagcgacttctctttcatggcggtacgtccttgagggttcaaatttaagatatcaaagtgatatcacctgtccactaccgttcgtcggatgccatggtcagggtgcccggccagctagaatgccctcccgccttcacatcgctgctggaaccgccatggccaagcttggaacgccgttgtccccctccgccacccgcgtgctgctgctgggctcgggcgaactcggcaaggaggtggccatcgagctgcagcggctgggcgtggaggtgatcgccgccgatcgctatgccgacgccccggccatgcaggtcgcgcaccgctcgcacgtgatcgacatgctcgatgcgatggcgctgcgggcgctgatcgcccaggagcagccgcacctggtggtgccggaaatcgaggccatccacaccgagaccctggtccagctggaacaggagcagggcctgcgggtgatcccgaccgcgcgcgccgcacgcctgaccatggatcgcgaaggcatccgtcgcctggccgccgaaaccctgggactgccgacctcgccgtaccgcttcgtcgataccgaggcggaataccgtgctgccgtcgccgccatcggcctgccgtgcgtggtcaagccggtgatgtcgtcctcgggcaagggccagagcaccctgcgcagcgaggcggacatcgccccggcctgggactacgcgcagaccggtggccgcgccggtgccggccgctgcatcgtcgaaggcttcatcgatttcgattacgagatcaccctgctgaccgtgcgccatgccggtggcacctcgttctgtgcgccgatcggccatctgcagaaggatggcgactaccgcgaaagctggcagccgcagccgatgtcgagcgcggcactggcgcgtgccgaagagatttcgcgcgcgatcaccgatgacctcggcggctggggcctgttcggcgtggagctgttcgtgaagggcgacgaagtgtggttcagcgaagtgtcgccgcgcccgcacgacaccggcctggtgacgctggtatcgcaggagttgagcgagttcgcgctgcatgcgcgcgccatcctcggcctgccgatcccggtgatccgccagagcggcccgtcggcgtcgtgcgcgctgttggcacacggcgagggcgtgccgtacttcaacaacgtcgccgctgcattgcaggtgccggatactgccgtacgcctgttcggcaagccgagcgtgcatggccatcgccgcgtcggtgtcaccctggcgcgcgcggaaaccatcgacgaggcgcgcgccatcgcgcgagatgccgccgacgccatcggcgtcgaactgcgcccgtaaagcaaaaaggggacggaggggattaagtcgtttgtgccataaacgacttaatcccctccgtccccttttcagggccgtcgactctaccgcacgtccacccacaccaggtggtggtcgctgccgtcggcgatcttcgcttccgggctttcattggccggccagaagatgccgctgccgacgtactcgaaaccggtcgagggcagtacgtagtccaggcgcatcgtgccggacttcgggccgaaatcgccagtggcatggaacggtgcgcccttgcgctcgatgcccttggccgcataggccaggctggtctgctcgccaccgacgctgcgcggggtggggtagcgcagcacgcgggcgttctcgatcagttcgacgatcgcctcatggcggccatcaccatcgaccgggtcgttgttgaggtcgccgaggatcacgaagcgcgcatcctgcgccaggccgccgcagtggcccttgtcgtcgcacagccatggcttgtcacccttggacaggtattcctgccacaggcgcagctcgtcatggttgcgcgccgcgttgcgcttttccgggccgtcgaacaccggcggggtcgggtgcgagaccagcgcgtgcaccacgccggccggggtctttaccggcacgtcccaatgcgacttcgacgacaggcgcagctgcgaccacacatggtcgttgtagaagctctggccggtacgtgggtcgaccgggcggatcgcgccgggcatcgcgctccacttcagcagctggaagctgcgcaccctggcttcgtcgatcgggtagcgcgacagcaccagcatgccgtactggcccgggtgcaggccgtagccccaggcatcgttgccgcggctgcggccttcgccaccgaccacgccgttgttgtccaggtccaggccgctgggcacgccggtgttgaccggggccagatagcggtaggcgaaatgcagcggcttgccgccaccgggctgggcgacctccaggtagcgcttctggaacaggtcggcggcgcgatgggcgtcgtcgaagtcgaattcgttcagcagcaccaggtccgggcgcacctgctgcagcactgcggcgatcttgcgcgcgtgttcgctgtcgccttccagctccttgatcaggccaccggcgtcatcggagtacagcgaggtgttgtaggtggccaggcgcagcgcagcggacggcttttcggtcatcgcaggggacgtggcgaaggcaggggcggtggcgccgcagagcagggccagggcgaggatcaggggatggcggcgggtcatgttcatgggccgtattgtgcacccggcccggtgtcagcggtttgtcagcgcccgtccagatccttgtcgaaatcgtgccagcggcggccatcgtaggcttccagcggatggaagcggcgcttgtagtccatcttctggtggccgcggatccagtagcccagatacacgtgcggcaggccctcgcggcgcgcccactcgatctgctgcaggatcgcgaaggtgcccagcccgcgcgcggcgtggtccgggtcgaagaaggtgtagaccgccgacaggccgtgctcggtgacgtcggtcaccgctacccccagcagctggctgggctggccgtcgtggccgggcaggcgcatctccatgaagcgggtgtgcgaccagctgccgatcaggaactgctcgaactcgtgcgggccgtggtcgtccatgccgccgttggcatggcggtgggtgaggtagcggtggtacagcgcgaacaggtcatcgcgggcggtggcggcggtgatccgcacctccaggtcgtcattgcgggtggcacagcggcgctggctgcggtccggggcgaagcgggccaccgggatgcgcaccgccacgcaggcctggcagtgcgcgcaatgcggccggtagaccaggtcgccgctgcggcggaagccccagctcagtgccagtggatagagcgcgccgaggcggcggtcgttcgggtccagcaccaggtcgcgtgccacccggtccgaccagtacccgcaggggtgctcgccggtctggaaaagtcgcagttcgtcgtctctgtcgccatgtatcgccatgggcacagcatagccccaggttgtcgcagtggcggcgactgtccgccggatgaatggaatcggcagtagcgtcaaccgacgtcgcgcccgggcgttgttgtcccccgagggtgaagtgatcaccccgacgctgttcccatccccaggagtgacctcatgatccgtacccccctgctgctggccctgctgcttggcacctccgcatccggtatcgcgctggcggccgacaccccggccacgccggcaccgcgcccggccaagctggacaccaacggtgacggcgtgatcgaccgcagcgaggcggccgccaacccgcgcctggccgcgaagttcgacgagctggacaagaacaaggacggcaagctctcgcgcgacgagctgccgcgctggcagcatggccgtcgtggccacggcggtgagcgctgggccgcgctggacgtcaacaaggatggccgcatcagccgcgaggaagccaaggccgatccgcgcctggccgcgcgcttcgaccagcttgatctgaacaaggacggctacctggacaaggccgaccgcgagctgcgcatgaagcagcatcgtgatgcctggttcgccgccgccgacaccaacaaggacggccagctgagcaaggccgagtttgatgcggccaagggcccgatgcatggtggcccgcgccatggcggtccgcgcgacggcggcgcaccgaagccgcagcgctgagggtcaatgcagtgatgacgacaacgccggcggcactgccggcgttgtccgttacaggcggccgctgcgcatcagcgagtacgccacaagcgcaatgaccatcaggttcatggcgatgatggcggtgcggccgtacatcgattcgaacttccagttgatgccggttcgcccgcgccgcgccgaatcgcgcgcgatcatcggcgccatcacccgctgcagcgtcaccaggcactggtagttgaccacgcccaacccgaccgccagcaccgtcagctgcgtccagaccggtgcctgcagcaccacagccagcaggatcgccaggcaccagaacatgccggtggtgatgttgaggtagaggaagcggcgcacatcggcccgctctgccgcagtttcggtgtacgacatcaggaagcgcccgccgaggtagctgccgatcgcgccacccaccacgccgccgatcaccgccccccagctttcggccggcagcacatgcaactggcccagggtggcggtcaacgagcccatcgcggttccaccggcaacgctggcgccgccgaggccgagcttgctgccgccgatgccgacgccggtgccgagcagcaccgctgcactggcggtgccgggcgcggccaccagcaccatcgacaccacggcggtggcgaatgcagcgctcggcgcgctgctgcgggcgaattcaccgaagcgctgcagcaggccttcgcgcaccagggcacgtgcacgcgacaggcgcttgcgcacggccgcatcgctgagcccgagcaggtcggcgacctgttgcgagcgctgtccctcgcggtagtacagcaacagcacttcgcggctgtcggcgggcagggtggagatgatgtcctcggcggcgatctcttcctccacccgctgcaggcggtcagccgcgcccggcgacgggtcggcggccatgcccatcgctacctcggccgcctcgccggtcagcggccgcccacgctgggcgcgcagccagtcgcgggccaggttgcgggtgatctgccgcagccagggcaggaagctggtcgcgctgcgcagctggtgcagctgctgccagcccttcacgaaggcctcctgggcgatgtcctcgctggcctggcggtcgcgggtgatggccagggcgatggcggtgaccgtgttctggcaggccagcacgatacggccgtaggcgtgctggcaaccgctggcggcggcgggcagttcgcgttccagggtctggtcgatcgatgcggcgaacgtcgtcatggcggcggctctcctgctgggattgtgtcccatgacggagccgcgcgcccaatgtgaccgacttcctgtgctgacaaaaaaggggacggaggggattaagtcgtttgtgccacaaacgacttaatcccctccgtcccctttttgcagttgccggccagcggcgggtacgacccgtgggttatttcgatggctggatgcggacccggacttcttcctcttccggtgcggcctgcggggccggttgcgcctgctgcggctgggcctgcggggcaggggccggtgctgccggggccgggacaccgcgatggcgcaggccgatcaccagcgccacgccggcgatcaccaccagcagggcgatgcggatgcgccaggcccagctgcggccgccgctgccctgttccggcgtgtcgcggaaggcgaactcggcggtcggatggtcgcggcgggtggtgtcgagcaggcgcgcctcacgcaggatctcgcgtgcacgcggctggtcgtcggcgcgcacgatccataccgccgggtaggcgttggcgttgccgaggtcggtatagctgaactggccgcggcgacgggtcttgtacgagcgcccgttggtcaccttgacgtcgatgccatgcccgcgcaggagctcggccacgccttcgacggtttccacgcgctggctgctgaagatctggcgcatgggtttactccttggccggcacggcggccgcggcagcctggtcgggaaccacgcggatcaggccctcctgcgcggtgctggccaccagcacaccattgcgggtgaagaactggccgcgggccaggccgcgcgaatcctgcgcgctggggctgtccagcgagtacagcagccagtcgtcggcacggaacgggcggtggaaccagatcgcgtggtcgagcgaggccatctgcacgtgcgggtggtagtagctgatgccatgcgggaacgtcgccgtgcccagcaggtggaagtccgaggcataggccagcagggcctggtgcagttccggagcatcgccgaccggctcgctcaggcgcagccacacctggtggtagggcgggcgcttgggcgggttcagttcgtcgcgcgggtagacgtggcggaattcgaacgggccgccgcgcgacagccagcgctgcaccttgatcggcagacgctccagcacttcggccggcagcggccggttcggttcgatgtcttccggctgcggcacttcgggcatcttgtgctggtgctcggcgccggtctcggcctgctggaacgatgccgcgcagaagaagatcaccttgccgtgctggatcgctgtgacccggcgcaccgagaagctgccgccgtcgcgggtacggtccacgtcgtagacgatcgggtggtcgatgttgccggcgcgcaggaaataggcgtgcagcgagtgcacgtggcggccgttgtcgaccgtggcctgtgccgcggccagcgcctggcccagcacctgcccgccgaacacgtacttggtgccgatgtcgcggctctgcccgcggaacaggttgtcctccagccgctccagcgtgagcaggtcgatcagctcggagacgacgggttcgggcgtgtcgttcaagggggcggccacagcagtgaaagagggcctgattataccggtcaggggtcagatccctttcgcccggcgaaagggatctgaccccgggcggggcaaccgctatttgcccagccgggctaccagggcctgcagggcgttctgtgcgtccggggcgaaccaggcctcgacgaaacggtcgagctggatcaggtccggctgcagcgccacgtgcaggtcggcgcgggcgatggcgcgggtcagcagcatcggctggcgcggctgcctgagcaggtcctgcagccaggcaatcgcgcgtgccaccaccaggtccccctctgccagctcatccaccaggccgatctgcaccgcctgttcggccggtaccagcgaaccggtggtcagcagcacgccggcgcggtgcacgcccaccgcacggcgcagcagtcgctggatgccctccggcgcgatcaggcccacctgcacctcgttcaggccgatggcatatggccgcgacggatcggcgctgcgggccatcacccggtagtcgcagcacagggccagcacgcagccgcccgccggggcgtggccggtgatcgccgcgaccaccgggatgcggctctcggccagcgtgcgtacggcgccaaagaaggcgttccaggtgtccagcagcttgtgcttgtcatcgccatgcgagagcaggtgcggcacgtccatgccgccggtgaagatgcgctcgctgcccgacagcacgatgccgtgcgcgtcttcggccatggccagctcgatggcatggatcaactgccggcacaggtcggtgtccagtgcgttgaccggcggccgcgccaggcgcagttcgcggatggggccatggttgatcacctcgatgagcgtcgtcatgctgcggtctcgttgcgaagaaggaacctgggcgatgataaccaaaccattcgttggcgtactgtggcttctgtgtgcggccgcagcatcggcctcggcggcggaatcgggctgcgtcacggtggatcagggctgggcgcggttgccaccgaatccggcaatgccgatgaccgctggctacggcgtcatccacaacggctgcggcaaggcggtggtgatcaccggcgcgaccagcagcagtttcaatgatgtgtcgctgcacgaaaccacgatcacggatggggtcagccggatgcgcgcgatcgagcgcctgccgctggcgccgggtgcacgtgccgagctcaagcccggtggcctgcacctgatgctgatgcagggcaagggcgcgctgaaggaggggcaggcggtgccgctacggctgcagctggaaggcggcggcgaagcgagtgcgacgctggccgtacgcaaggctgcgccgtagcgggatggtcgtgccggccgctggccggcagcacaggaaatgctggccagcggccggcactaccgcagggccttacgaccagtcgtacgagaacagcacggtgcggctttccggctcgtacagcatcacgatcgcatcggcgccggtggcgcaccagttgtagccggctacgccggccacggcgaagaacttgttgccgttgcgggtgatgatcaccgtttcggcatcgtccgcagcgtttgggtcatcggcagcgtcggtgaagcccagttcgaaggccgcgggaatctccgcggtctcggtccagttgccgaagcctataggcccgcccagcgtatccaggtagtcgcgttcgctggcctcacccttgccgtagcgcgagtagcaggcgagacggccgtgcgcggcatggtaatcgcgggccttggcgtagctgtcgcgcatctgcgcgatgtgctcctgcgcatccttgtcctgcaccgcctcgccgatgaaatagccctcattgccgaggaagcgcatctcgttgccggcggtcagttcgaaggcgatccagttggtgccggtgaaatcgttgtggtgttcttcggtggtctcgccgatgcagccgtcgtacggctcgatcgggcacagcattgtcgccacctggccggccagctccggccgcagcacgcccaagtcgatcttcagcagcggcagcaggtgctggccgagccaggcctggtcggcgggaaagacgtcggtggggaaggggaccatgccgggcagcaggtcgcgcagttcagtctggtggatcatgtcagtccattgaatgggatcggtagtgccggccgctggccggcaacctcattgcagccaaagcgtgccgaccaaggtcggcacctaccagggcgcgtcaagtggaggcgctgcggatcgcctccggcagcggcgcgctcttgccggtctgcgtatccatccacaccaccaccacgttgccgtcggaatacagcttcgacgcgtcgtgctggtcgacgatgcggtggccgatggtcacgctgctgttgcccaggcgctcgacgaacagctcgaccagtatgtcgttgggccacacgatcggcagccggtaattgacgttggtcgcggccaccaccggtgcgatgcggtcggtcatcgatacgccgtccacgcccagcatccagcgcacgcgcgcttcttccaggtaggaaatgtacttggcgttgttgacgtggcccatgctgtccatgtcacgccagcgcacgctgatcgggatgcgggccaggatcttgtgttcgctgctcatcaggcgtccttcttcttcgatgtgctcttgctggccttgccggtgctcttggcggccgcggccttcttggcaaccttggccggcttctcaggcttcaccttgcgtggcgggcgggcgtcgggcttgttggccacggcagccggctgttccgggcgcgcgctggtggacggcagcatgcgcgccaggaactggccggtatacgactgcggacaggccgccacgtcttccggcgtgccggtgaccaggatggtgccaccgcggtggccgccttccgggcccaggtcgatgatccagtcggcggtcttgatcacgtccaggttgtgctcgatcaccaccaccgtgttgccttcgtcgcgcagcttgtgcagcacgcccagcagcgcttcgatgtcgtggaagtgcaggccggtggtcggttcgtcgaggatgtacagggtgcggccggtatcgcggcgcgacagttccttggacagcttcacgcgctgtgcttcaccaccggacagcgtggtcgcgctctggcccagtttgatgtagctcaggccgacgtcgaccagggtttccagcttgcgtgcgatcgacggcaccggttcgaacagcttcagtgcatcctcgacggtcatttccagcacgtcgttgatgttgaagcccttgtacaggatctccagcgtctcgcggttgtagcgcttgccatggcagacgtcgcagggcacgtacacgtccggcaggaagtgcatctccaccttgatcaggccgtcgccctggcaggcttcgcagcggccaccgcgcacgttgaagctgaaacggcccggcgaatagccacgcgcacgcgcttcgggcacctgtgcgaacagttcgcgcaggggagtgaacaggccggtgtaggtggccgggttcgaacgcggggtgcggccgatcggcgactggtcgatgtccaccaccttgtcgaacaggtccaggccatcgatctccttgtacggggcgatcgggtgcgaggaaccgttgatctcgttggcggccagcgagaacagggtgtcgttgatcagggtggacttgccggagccggacacaccggtcacgcaggtcagcaggcccgacggaatcgccaggtccacgcccttgaggttgttgccgctggccccgcgcaggtgcagggtcatcttcgggttcggcttgtgccggcgcgcggggatctcgatcgcgcgcttgcccgacaggtactggccggtcagcgagcgcggtgcctccaggatgtcctgcagggtgccctggccgacgatctcgccgccatgcacgcccgcgcccgggccgatgtccagcacgtagtcggccaggcggatcgcatcctcgtcatgctcgaccacgatcaccgtgttgccgaggtcgcgcaggcgggtgagagtgccgagcaggcgctcgttgtcgcgctggtgcaggccgatcgacggctcgtcgagcacgtacatcacgccgaccaggccggcgccgatctggctggccaggcggatgcgctgtgcctcgccaccggacagggtgtcggccttgcgttccagggtgaggtaatccaggcccacatcgaccaggaagccgaggcgctcaccgatttccttgacgatcttcgcggcgatctcgccacgccagcccggcaggctcagttcgctgaagaacttcagcgcctcgtcgatcggcagcaccaccagctccggcagcgggcggtcggccacgaacacgttgcgtgccgccttgttcaggcgcgcgccatggcattccgggcacggctgttcgctgatgtacttggacagctcttcgcgcaccgccggcgattcggtttccttgtagcggcgctcgaggttgggaatgatgccctcgaagcggtgcttgcgctgggtgcggccaccggcttcggtgaagtaggtgaaggtgatcgcctcatcgccgctgccgtacagcacggcctgctgcacgttctgcggcagcgagttccatgccgcgtcgacgtcgaaccggtagtgcttggccagcgaggcgatcagctggaagtaataggcgttgcggcggtcccagccgcgcaccgcgccggcggccagcgacagctcgggatgcaccaccacgcgcgaaggatcgaagaattcggccatgcccaggccgtcgcagccggggcaggcgcccatcggtgcgttgaacgagaacaggcgcggttccagctccggcagcgagtaatcgcagaccgggcaggagtacttggaggagaacagcgtcggcgaagcgtcggcactgtccaggctctgcaccgaggccatgccgtcgcccagcttcagcgcggtctcgaagctctcggccaggcgctgcttgatgtcctcgcgcgggcggaagcggtcgatcaccgcctcgatggtgtgcttctggcgcagcgccagcggcggcaccgcatcgatttcatgcagctcgccgtccacgcgcacgcgcacgaaaccctgcgcgcgcagctggtcgaacacctgggcatgctcgcccttgcggtcgcggatgaccggggccagcagcatgtagcgctgttccgggtccagggtcagcacctggtcgaccatctggctgaccgtctgcgcctccagcggatagccgtggtccgggcagcgcggggtgccgacgcgggcgtacagcaggcgcaggtagtcgtagatctcggtgatcgtgccgaccgtcgaacgcgggttgtgcgaggtcgacttctgctcgatcgagatcgccggggacaggccctcgatgtggtccaggtccggcttttccatcacgctcaggaactggcgcgcataggccgacagcgactcgacatagcggcgctggccttctgcatagatggtgtcgaacgccagcgaggacttgcccgagccggacaggccggtgatcacgatcagcttgtcgcggggcaggtcgaggtcgaggttcttcaggttgtgcgtccgcgcgccgcggatgcggatgaaatccatcgccatgggggatccggttgtgggggcgttggctgggtgccgggccagcagggaacggcaatcggtcagcctaccgaggtgaccagatgggggcaatgggcgacaatgccagcccgatgtctcatctggtgagacaggccgtcaggcaggggtcagatcccttttcacggggtgaaaagggatctgacccgttccggagccgtccccccgcggcgttcgggggttgacttgacccgcgcccgctgatctgcgtacaattccgctcctgtccgccctcgatggcggcagctcagaccacaataactacagaggaaggcctggtcatgtacgcagtactggtcaccggcggtaagcaataccgcgtggcgcagggcgaaaagctccgcattgaaaagctcgaagtcgaagtcggcagcgagatcaagtttgacaacatcctgatgctgggtgacagcgacggcgtgaagctgggcgatgcgctgaagggcgctgccgtcaccgccaaggtcctgtcccagggtcgtgctgacaaggtccggatcatcaagttccgtcgccgcaagcaccacatgaagcgtcagggtcaccgtcagtactacaccgaaatcgagatcaccggcatcgccggctaagcatcaggagaagcagtcatggcacataaaaagggcgtaggctcctcgcgcaacggtcgcgactccaacccgaagtacctgggcgtcaagatcttcggcggccaggccatcgaagccggcaacatcatcgtgcgtcagcgcggcacccagttccacccgggcaccggcgttggcctgggccgtgaccacaccctgttcgccctcgtggacggcaaggtggagttctcggtcaagggcgccaagaagcgtcgcaccgtcagcatcgtctcggccgacgcctgatccaggcatcgccggcacccgtgccgcggcatggccgtgctggatgaagagcacgctgcatggagagccccgcttcggcggggcttttcgttagagttgaagcaagaccggctgggccgggttgccggcccgcggccggcatgacattcaaggtggcggccagcaggtcgcgcccatcgcaggcatcgaaacaatgaaactggtagacgaagcagaaatcgaagtgttcgccggcaacggcggcaacggctgcattggcttccgtcgcgagaagttcattccgctcggcggcccggacggcggcgacggcggtgcgggcggcagcgtgtacatccgcgccgacgaaaacctgaacaccctggtcgacttccgtcatgagcgtatcttcaaggcgcagcgcggcgagaacggcatgggccgccaggcctatggcaagggcggcgaagacctgaccatcaccgtgccggtcggcaccgtggtcatcaacgttgccaccgatgaagtcatcggcgacctgacccagcacggcgaccgcctgctggtggccaagggcggtcgcggtggcctgggcaacatgcacttcaagagctcgaccaaccgctcgccgcgccaggcgctgccgggcgagccgggcgaagagcgcacgctgaagctggagctgaagctgctggccgatgtcggcctgctgggcttccccaacgccggcaagagcaccctgatccgtgccgtttcggcggcaacgccgaaggtggccgattacccgttcaccacgctgtacccgaacctgggcgtggtgaaggtggagaaccaccgcagcttcgtgatcgccgacattccgggcctgatcgaaggtgctgcggacggcgccggcctgggtgcgcagttcctgcgccacctgcagcgcacccgcctgctgctgcacctggtggacatctcgccgatggaaggcggcgtggagggcatttcgccggtggagcaggtgcgtgcgattgaacgcgagctggagaagcacgatccggagctgctgaacaagccgcgctggctggtgctgaacaaggctgacctgatgttcgaagacgaggcgcaggccgcggcggagcagatcgtcgccgagctgggctggaaggagccgtggttcctggtttccgcgctgggccgcgaaggtaccttcccgatcatgagccggatcatggccttcttcgatcgccagaaggaagacgagctggaagcccgcaacgcgcagtgaatgccgttgtggttccatgcggaaaacccggcttcggccgggtttttcatttggtagtgccggccgctggccggcaatcccggtgaaccgcaggcaacaaaaaacccggccgcggccgggcttttgtctgctgcccaaccccgaagggcagggcggcaacgccggatcaggcggccttgagggccttgatgcggtcgttcaggcggctcttgtggcgagcagccttgttcttgtggatcaggccacgcgcgctgaagcgatccaggatcggctgggcaacggcgaaggcggcttcggcgccggcggcatcgttggcgtccagcgccttgatcactttcttgacagcggtgcgcagcatcgagcgctgagccacgttgcgcgcgttgcgcacgacggtctgcttggcgcgcttcttggcggacttgatattggccacggtggtggtttcctgaaaaaatcggtgttatgggaacagcaagctagctagtatgatggcccgagaaatgcacgtcaagtcgattgtcaagagggacgctgagtgagttcaccgaagatgttgcggggcctgctgtcgttcagcagcatgaccatggtctcgcgggttctcggacttgtccgggatcaggtgatcactaccacgttcggcaccaatgcggttaccgatgcgttctgggttgccttcaggatacccaatttcctgcgccggttgttcgcggaggggtccttctccaccgccttcgtgccggtgttcaccgaggtgaaggagacccgcagccacgccgaactgcgtgagctgatgtcccggaccgccggcaccctgggcggggtgctgatgctggtcaccgccctggcgctgatcttcgcgccgcagctggcggtggcattctcaagtggtgctgataccgacccggtcaagcagaccctgctggtcgacctgttccgcctgaccttcccgttcctgctgttcgtgtcgctgaccgcgctggccggcggtgcgctgaacagcttccagcgcttcgcgatgccggcgctgaccccggtcatcctcaacctgtgcatgatcgccggcgcgctgtggctggcgccacgcctgggcggcacgccggaaaagcagatcctggcgctgggctgggcggtactggcggctggcctcctgcagctgctgttccagctgccctcgctgaagggcatcaacctgctgaccctgccgcgctggggctggaaccatccgggcgtgcgcaaggtgctgacgctgatggtgccgaccctgttcggttcgtcggtggcgcagatcaacctgctgctggataccctcatcgcggccaagctgaccgacggctcgcagtcctggctgtcgctggccgatcgcttcctggagctgccgctgggcgtgttcggcgtggcgctgggcacggtgatcctgccggcgctggcccgccaccacgtcagcaccgaccgcgagggcttctcgcgctcgctggactggggcctgcgcatgaccctgctgatctcggtgccggcgatgctgggcctggtgctgctggccgagccgctgatcgccaccctgttccagtaccgccagttcaccgcgttcgatacccgcatgaccgcgctgtcggtgtatggcctgagcttcggcctgccggcgttcgccctgctcaaggtggtgttgccggccttctacgcccgccaggacaccaagaccccggtgcgcgccggtgttgccgcgctggtggccaacatggtgttcaacttcgccctgctggccgtgctgtaccaggtgatggtgccggacgcgctgaaggcacagggcgtgatggcggcgatcggcaagcagccgggcctgcacctggcgctgggcattgccagtgcgctgtccagttacctgaacctgggcctgctctggtactggctgggcaagaccgacgtctaccagcggcggccgggctggggcggctatctggtgcggctgggggtggcctgcgtggccatggtcggcgtgctgctggccctgctgcactgggtccccgacttcaccggcatggacaaatggcaccgtatcggtggcctgatgctgctggtcggcggcggcggcgcgacctacgtggtggccatgctggcgatgggcttccgcccgcgcgacctgcgcgggcattgatcgcggtccgtggcggctatacttcagggttacaccattgaagcggcggccccggtcgggccggaacgagagttgatgagcaggctgttcagaagcgtcgagggcggggagctgttccccaacggaagcgtggtctgtatcggtgcattcgacggcctccacctgggccatcgtgcgctggtccgccacgcggttgcccgcgcgcgcgccttgggcgtggccgcagtggccgtggcattcgagccgctgccgcgtgaattcttcgcccagggcacgccgccgccgcggctgaccctggcgcgcagcaaggtcgagatcctgcgcgagctcggcgtcgatgcgatcggcctgctgcgtttcgacgcggcgatggcggcgatgccggccgagaccttcgtgcgccggttgctggtgcaccggctgggcgcccgcgaagtgtggatcgggcccgagttctgcttcggcaaccgccgccgcggtgatctggcactgctgcaggagatgggcgccgaactcggcttcaccgcgggcgagatcgaagcggtggacctgcatggcgagcgcatctccagcacccgcatccgccagctgctgcaggagggcgatttcgcccgcgccaacgacctgctcggccgcccctacgcgatcagcgggcgggtggtgcgcgggcgccagctcggccgtacgctgggcttccccaccgccaacctgcgcttcccgaagaccccggcactgtcgggcatctacgcgacctgggtgcacggcgtgttcgaccagccctggccttcggtgtccagcttcggtacgcggccgacggtggagggcgtggagccgctgctggaagcccacctgttcgatttccagggcgacctgtacggccgccacatcgacgtggagttcgttgccaagctgcgcgacgaagagaaattcaatgatctggcggcgctgaccgaccagatgcaccgcgacgccgaacaggcgcgcgccatcctttccgaacatagattgcgagccactgcgtgagccaggactacaagaccaccctgaacctgccagccaccgaattcccgatgcgcggcgacctgcccaagcgcgagccgggcattctggcgcggtgggaagagcaggggctctaccagcagctgcgcgacaacgccgccggccgcccgctgttcgtgctgcatgacggcccgccatacgccaacggccgcatccacctgggccacgcggtcaacaagatcctgaaggacatcatcgtcaagtcgcgctacctggccggcttcgatgcgccctacgtgccgggctgggactgccatggcctgccgatcgagatcgcggtcgagaagaagtggggcaaggtcggcaccaagcttgacgccgtcgaattccgccagaagtgccgcgagttcgccgaagagcagatcaacatccagcgcgtggacttcaagcgcctgggcgtgaccggtgactgggacaacccgtacaagaccctgagcttcgatttcgaagccaacgagatccgcgcgctggccaaggtcgtggccaacggccacctggtccgcggcgccaagccggtgtactggtgcttcgactgtggctcggcgctggccgaggccgagatcgagtaccaggaaaaggaatcgccggcgatcgacgtcgcctacgctgcacgcgatgcgcaggccatcggccaggcgttcggcgtgagcgtgccggtcgacgtcgaagtggccgtaccgatctggaccaccacgccgtggacgctgccggcctcgctggcggtgtcgctgggcgcggagatccgctacgtgctggccgaaggcccggcccacaacggcaagcgccgctggctggtgctggccgcggccctggccgagcgcgcgctgcagcgctatggcgtggacgaagtggtgctgcacggtgaaaccaccggcgctgcgctggaaaaccagctgctggcgcatccgttctacccggagcgcgagatcctggtgctcaatggcgaccatgtctccgacgaggacggtaccggtgcggtgcacaccgcccccggccacggccaggaagacttcgtggtcagccagaagtacggcctgctggacaagtacaacgctggccaggtcactccgatcgacggccgcggcgtgtacctggaatcgaccccgccggccggtgacgtggtgctggcgggccagcacctgtggaaggcgcaggaggccatcgtcggcgtgctgcgcgacaacggttcgctgctggcgttccatccgatccgccacagctacccgcactgctggcgccacaagacgccggtggtgttccgcgccaccccgcagtggttcatctcgatggacaaggccaacctgcgcaacgatgcgctggccgccatcgacaccgtcggctggttcccgacctggggcaaggcgcgcatccagagcatggtcgacggtcgcccggactggaccatctcgcgccagcgcacctggggcgtgccgatcgcactgttcacccaccgccagaccggcgagatccatccgcgttcggtggagctgatgcagcaggtcgccgaccgcgtcgaagccgagggcatcgacgtgtggtattcgctggacgccgccgaactgctcggtgccgacgcggccgactacgagaaagtcaccgacatcctcgacgtctggttcgattcgggcgtgacccatgaaggcgttctcgccgcgcgtggcttcggcaagccggccgacctgtacctggaagggtccgaccagcaccgcggctggttccagtcctcgctgctgaccggcgtggcgatcgacaagcgcgccccgtacaagcagtgcctgacccacggcttcaccgtggacgagcacggccgcaagatgtccaagtcgctgggcaacggtatcgagccgcaggacatcatgaacaagctgggcgcggacatcctgcgcctgtggatcgcctcggccgactacagcaacgagatgtcgctgtcgcaggagatcctcaagcgcaacgccgacgcctaccgccgcctgcgcaacaccgcgcgcttcctgctcggcaacctggacggtttcgacccggcgctgcacctgcagccgctcgagcagatggtcgcgctggaccgctggatcgtgcaccgcgcgtgggagctgcaggagaagatcaaggcggcctacgacggctacaacatggccgagatcgtgcagctgctgctgaacttctgcagcgtggacctgggctcgctgtacctggacgtgaccaaggaccgcctgtacacgatgccgaccgattcgcacggtcgccgttcggcgcagagcgcgatgtaccacatcgccgaagcgttcacccgctgggtggcgccgatcctgaccttcaccgccgacgagctgtggggctacctgccgggcgaacgcgccgggcacgtgctgttcaccacctggtacgacggcctggcgccgctgccggccgatgcccagctcaacgccgccgacttcgaccagctgctggccgtgcgcgagcaggtggccaaggtgctcgaaccgatgcgtgccaacggtgcgatcggtgccgcgctggaagcggagatcaccatcgccgccagcgaagagcaggccgcgcgctggcagccgctggccgatgaactgcgtttcctgttcatcagtggcgacgtgcaggtgcgcccggcgaccaccgacgaggtgttcgtcagcgcccagccgactaccaaggccaagtgcgtgcgctgctggcaccaccgcgccgacgtcggcagcaacgccgaccatcccgagctgtgcggccgttgcgtgagcaacgtgaccggcgccggcgaagtgcggagctggttctgatggccgcgccccgtccgcatccgaacgccctggtctggctgctgctgtcggtggccatcatcggcctggaccagtggtccaaggcctgggtgctgtccagcctgccggagttccagccggtggtggtcatcgacggcttctggaactggtaccgcacctacaacaccggcgcggcattcagtttcctgagcgacgccggtggctggcagaagtacttcttcaccgcgctggcgatcgccatcagcgggctgatggcgtggtggctgcgcggcaccgcccgcggcaactggaaggccgcggtgccgtatgcgctgatcatcggcggcgccatcggcaacgtgatcgaccgccaggtgcacggccacgtggtcgacttcatccagtggtacgtgggcagctacacctggccctcgttcaacatcgccgactcggccatcgtggtgggtgccatcggcatcgcactgtttggcctgttcgacggcaagtccgccaaaaaggcggataatgccaacccgaaaccgtaagccggctgccgccgggagactgaactgatggatgtgctgctcgccaacccgcgtggtttctgtgccggtgtcgatcgtgcgatcgagatcgtcaagcgcgcgatcgaaacgctgggcgcgcccatctatgtccgccatgaagtggtgcacaaccgcttcgtggtcgacgacctgaagcagcgcggcgcgatcttcgtcgaggaactcgacgaggttccggacaacaacaccgtgatcttcagcgcgcatggcgtgtcccaggccgtgcgccaggaagccgagcgccgtggcctgaaggtgttcgacgccacctgcccgctggtgaccaaggtccacttcgaggtcgcgcgccactgccgtgccggccgtgacgtggtgctgatcggccacgccggtcacccggaggtggaaggcaccatgggccagtggaaccgcgaagccgggaccgggcagatctacctggtcgaggatgtcgagcaggtcgcgacgctgcagatcaaccagccggaaaacttcgcctacaccacccagaccacgctgtcggtggatgacacgcgcggcatcatcgatgcgctgcgcgagcggttccctgcgatgcagggcccgaagaacgacgacatctgctacgccacgcagaaccgccaggatgctgtgcgcgacctggccaagcgctgcgacctggtgctggtggtcggttcgccgaacagctccaactccaaccgtctgagcgagctggcccgccgcgaaggcgtggagtcgtatctgatcgatggtgcgcacgagatcgacccggcatgggtggcaggcaagcagcacatcggcgtgaccgccggcgcctcggcgccgcaggtgctggtcgatggcgtgctggcgcgcctggccgagctgggcgccagcggcgtgggcgagctggacggcgaaccggaatcgatggtgttcgcgctgccgaaggaactgcgcctgcgcctggtcgactgagcgcggaacgacgtctgcagggtacggcccgccactacccggtgtgggtgcgaaccgaaactgatctggtgggtgcgaaccttggttcgcacgcctttggcatggccgggtgggcgcaccgcccatgacctttggccatggggccggccatcgcacaggcctagcatcggaggattccccgttgttggaaactgcctgatgaagacccgagccctggcgatgtcgttgctgttcgcgctggcggccacgcctgcacttgcgcagacctcgccaccggccaacgcggcggccccaggactgctgcgcatcgatgtggacgcgcgcgatctggcccggcgcatcttcaaggtgaccgccaccgtgccggccaagcccggccccatgaccctgctgtacccgcagtggattcccggcaaccattcgcccaccggcccgatcgacaagctggccggcctgcgcgtgaccgccaacggcaagccgctggcctggcagcgcgatcagtacaacgtctatgcgttcaaggtgaacgtgcccgagggcgccagcgagatcgtcgcccacttcgatttcctgtcctcgcagggcggcagccagggccgggtggtgatgaccccggaaatgctcaacctgcagtggaacgccaactcgctgtatccggccggcatcgacgcgcgccagctgcaggcgcaggccagcgttaccctgcccaagggctggtcgttcgccactgcattggagaccgcgcgccgcgacggtgacaccgtggtgttcaagccgatctcctatgaccatctggtcgattcgcccttgtttgccggcgagcactaccagcgcatcgatctcgatccgggcgcgaaggtgccggtgcacctcaacgtgtttgccgacgacgccaaatcgctgaagccgagcgaggcgcagatcacgatgcaccgcgcgctggtgcagcaggccgacaagctttacggcgcgcggcactacaaccactatgagttcctgctggcattgaccgaccgcctcggtggcatcggcctggagcatcaccgttccagcgagaacagtgccgacccgggctacttcaccgagtgggacaacaacgcgtggatgcgcgatctgctgccgcacgagtacacccattcctggaatggcaagtaccgtcgcggcgccgatctggccaccgccaacttcaacacgccgatgggcgatagtctgctgtgggtctacgaaggccagacccagttctggggccaggtgctggcggcgcgttcagggctgtggtcgaccgcgcaggcgcgcgacatgctggccaacgtggccgcgacctatgaccgtggtcgcccgggcctggcctggcggccgctgcaggacaccaccaatgacccgaccatcgcgcagcgccgcacgctgccttaccgcaactaccagatgagcgaggactactactccggcggccagatgctgtggctggaagtggagggcaagctgcgcgaactgagcggcaaccggcgcagcctggatgacttcgcacgtgcgttcttcggcgtcggcaacggcgactgggacgtcaacccgtacaccttcaacgacgtggtcgcgaccttgaacggcatagcgccgtatgactgggcgacgttcctgcgcgggcgcctggacggccacggttcgttgaccggcggcctggaactggcgggctggaagctggtctaccgcgatacgccgaacgacgcctacaaggcacaggaaaaacgcgccaaggcggcgctgctggcgtactcgctgggtgcgaccgtgctcgacagcggtgtggtcggcgacgtgatctgggacagcccggcgttcaatgccggcctggcgccgggcatgaaggtgattgccgttggcgggcgcgagtacagcagccagcgcttgaaggatgcggtagctgcggcggcgaaggacaaggcgccgatcgtgctgctggtgaagcagttcgaccgcatcgaaacgatgaacatcgcctaccacggtggcctgcagtacccggtgctggagcgtatcgccggcaagcctgaccgccttgcggacctgtggaaggcgcgatgaaaccgcgcgcccgcgatggcatgatcctgttgatggcgatcctcgccatcctcggtgcattcctgcacggcgacgggcgctggctgcattggctggccaagccgaccaccacgctgctgatcgctgccatcgcctggcgcgtgcatgatccagcgcagccgttctaccgacgcgcggtgctggctggcatgctgctgtcgtgcgtgggggatatcgcgctgatgttgccggtggatgcgttcgtgccggggctggtcgcgttcctgctggcgcacctctgctacatcgtcgccttccgcgatggcctgcgtgccggacgtggcctgcttgccgccagcgtcctgctcggcgcgttcgctgtactgaatgtacttggtctgtggccgcacctgcccgcaccgatgcgcattccggtgctggcatacgtggtggtgctggcctcgatggcggtcctggcgctcgcacgccagtggcggcgaccgcacaccgatgcaatggatgccagcagctcccgctgggcggccgccggtgcgctgctgttcgtcgccagcgactcgctgctggcctgggaccgcttcgccggcggcctgccactggccagcctgctggtgctgtccacctactacggcgcgcagtacgccatcgcccgctccgtgaaacagcaaaaaggggacggaggggattaagtcgcagacggcaccaaggcacaaacgacttaatcccctccgtccccttttcgcgttgactatcggagggtcgcgttgccagaacggccttgtgcgtcgaaagagagtcgtgcggactggcgatcaccggcgacttcgtccggcagccagaccagagtgccacccttgcgcacgatcacatagacgtggccgacttcaccgggagtgcccatcaatgcgttgcgctgtgcctgcagtgcctgggccacgcgcggcaccgcctcgaaatcgatgttggccagcgccgtgctgctgcggcgcagggtgatggtgggcgcgaagcgctgcggattgaccgggtcgcccttgcgccactggccgcgttcgaagtggtagctgtccacgcgtgacggctgctgcggatccaccaggtccagattgatccggccatcgtcgtagaagtggatgctgtggaataccgtcagccggtgcccggccagcgcaggcatctgttccagtgcctggcgggcggccagcaggtagtccgcatcgaacaaccggttgttgcgttcgggcaccggcggcaaccgcggctcggtcatcggcgcgagcgaagcgggcctctcgcgcgctggcggcatggcgatcggcgcgcttgcgctgtcggcctgcaccgaatggcccagtgtttcgcccagcgtctgcagggctccgcctgccacggcgacgccggccagcaccagcaacaccacggagaacaccagccgggtcgagggcggctgcttcatacaccctccaggcgaacgttgcggcgatcttccgggtcgtacaacagcgtgacccgctcgcgcggaagattggccagctcgatcaacgcgatgaagcggcgcacgctcacctgctgcacgccaccttcgcggtcgatgtattccagctggaactccacctgcggctgctcgttgagataggtgccggtctggcgcagcttcagcaccttcgcatccacgccgatgccgcgatacttcagcgcgtcaccgcgggcgtcggcctgcagcagccggccgagcaggcgcaggcccagcgcgtagccgcacaacaccagcgggcacaccagcagcggatgaccgagcgacaggaaggtccagcccagtccctcactctgcagccgataggcggccacataggcactggccaccgccacgatgccgatcgctgcgccgacaccacgacgccagaggctggcgacatccagttcgggttgcgccccctccagcaccacgttggggaacgcgcccggcatccggctcaggcgtacctcgatacgcttgccggcaacgaaacgctgcagttgcggcttgctgtccaccaccagcatctgttcgttgatgggcgtgccggacaggttctggaagcccagttgcagcttccactgagcgaagccgcgcacgtgcacgccggtcggctcggcctgttcgatcaacgcgtcgcgcggctcaccgccggccaggatggtgcgcacccgatgcagcgcgcgcggcgggcccagcagcaggtagtgcaggaaggcgagcagcagggccagccacaggatcaccgacagcgcgagcagcagcagggccagccatggcgcgctgcggtcggccagttgcaccggccacgacgtgccgacatagaggatgcaggggaagggcaacgcgaagaacagcaggaacgcgccccagaaccagagataggccttcatggggtggtggggaaccgatggaacagggcgcgtagggtactacgctcagcggatctgcagggtcagcaagaagtagcggccgagcggatcgtcgagccccggcatctggccaccgttgccaaccatatagttcaccggttgcgtgtcgagcacgttgtgcacgtccagcgcggcgaccacgcgcggccccaggcgtcgtgcgagatgcaggttccagcgcagctgccgggggttcatgcagtggttctgctcgcgctgttcctccgggcattccgcaccgggcagccaggcgcgcgtgcgccccacctggttgccgcgcagggcgatgtcccagttgctgttctgccactgcacgttcagcacggcggccatcgtcggcgtgacatggccgcgcaggtccaccgttgcatcatggccacgttcgcggcgcagttcctgctgcttcagcgcatcgagcgagaacagccactggccggtgctgccggtatcgatgtggtactccccgcgcagtacaaagttgcgcgaggtggtgcggccgatgttgtcgaaggacaggcgcaggttgctcaggtggccgtcctcgtccagctcccaggtgccggggttccacaccgcgtcggccggttgcagggccaggatctcgttgcgcagttcgacgatgttgtgggtgagtgacagcgagaatgtatcggtcggcgtccaggtcgcggccagggaatggctgcgcgaccgctcggccttcaacgcatcgttctccaccacgtccacggtgacgctgcagcgcccgttgccgctgctctgcgcgcagtcgggcagggcgctggaggccggcagctcgatcgcaccgaagtagcccggggggcgccgctgttcgaacaggctgggcgcacgatagccgcgcccgctggcaagcaggaaggaccaccggggcgtggggctccagcgcacgcccacgcggggcgaaaaggcctggtagtcgccgtcgcggtcccagcgtgcggccaggtccatgcgcagcgtgtgcgccaggggcaggccgagttcggcgtaggcgccgccactgcggcgcgccaggtggcgctgctcctgcggcaggcccagcgccaggtcaccctggctcagcagggcgtcgggatgcgaggtccagcgctcctggcgcaggtcgatgccggtggccagctgtgcagcaccgccggccaatggcatcagctcgcgctgcatgccccaccagccctgccactgctcggtgcgcccgcggttgcggatcgacgggaacaactgctcggccgcgcccgccggcaacgaggtgaagccgggcaggaaatccagtgtctcggcgacccgcagcaggggctcggcacgcacggtgcccgacgtggacaggctgacatcgctgcgttgtgcgctgatgccggcatcccagctgcgccggccctggtcgcggccaatgccgaaggtgacgtcggcgtcggtggcacgtacatgcggacgcacgttgccggcttcgcgcagcacgctgttgaaggtgaacccgtacaggccgatggcaacggcggttggaccaaggtcgaagcgttgccggttgtggctggcccgcgcctcggcgtaggcatagcgaccttcgccgcgctcatgccggtagcgcaggtaggtcgaggcagtatccgaggccggttgcagcgagcgtggtcgggcgctgtcgaaccagcaggcaccatcgcgccgcgtcaatgggccttcgcagcgttctgccggccagtagcgtccatcgcggaacgcgccgatcaggtactgcgaggtttccgcatgccattggcggcgatcaccggccacgtggtcgatgcggtgcaggtcgatgccggcgaaccagcggtcccctccgtcgcgcacgccgccggtggccgcctgcacgcgatactggccagcgtcgccgcgcccgctcaggccggtctgcagcatggcttccgggccgtcagcctggtcgcgcaggatgatgttgaccacgccggacatcgcgtcggcaccatagatggccgaggcgccgccacgtaccagctcgatgcgttcgacgaagctgagcgggattcccccaagatcggtgagcccaccctgttccagcgacaccatgggatagcgtggcaggcgccggccattgaccaggaacagggtcgcacgcgggcccatgccgtccaggctggtggtggtggccgcacccaccggcaggtactgcgaatcgccactgcgcgaggtgctcatcgccgggtggccgttcatgcccggcaagtgccgcaacaggtcgaacaggctgccgtagccgctgcgcaggatgtcatcgcggtcgatgatggtgaccggcagcgtggtctgcacggaggtgcgcggcagccggctgccggtgacatggatcggcgccagttccacctgcggcggcgcgtcggcggatttgtgtggcgaacgtgctgcgggcgtggcgcgtgccgcgaccgacggtggcgatggcggtgcggggcgggtgcggcggacgacgaatccgccagcaggcgtacgcaggatgttcaccggcatgcccgcgaccagttccttcagggccgcagccgcatcgcggtggccatgggtgccggccgtgcgcaggccatccagctcacgcgcatcgaacagcagggcaatgccgctctgtcgcgcccattgctgcagggccggcgccagcgggcctgaaccaacatcgacctccagggtgcccgcttgctcggccgcagcggcagacggcagcgcggggatgcccaacgcgaggcagaacagggtgcggagcagcagccccccctgcagcgcgcccggtactgccatcaccgcaggcctcctcagtacgtgcggcgcagttccagcgcgccatccggtcgcgtctggccagccaccgaccagcccagttccagtgccgacagcagttcctgcgcgtcgccggcacggaaggtaccgcttaccgccaggctggcgatctccggatcggcgatcaccagcggcgtgtggccgtagcggttcatgcgttcgaccacgatcgacagcggtgtggcatcgaacaccagctgtccctgcagccagccttcagcggcggcattggacgacagtgccggaccgggctggatgcggcccgacggcagtacctgcagttgctggccgggcgccagggtgtgctgggtgcccccgctgctgacttccaccgcaccttccagcagtgcgacttcgaccaggccatcatgcaggcgttccacctggaaggtggtgccgatgtcgcggatggtgctgtcgccggcgcgcagctgcagggccttgcccgacggtgcgacctgcagctgcaggcggccacgttccagcaccaggttgcgatggcgccaaccgaaacgggcgtgcagggtggtgcccgcatccagcgtggccacgctgccatcggccagcgtctgcagccggggctggtgggaatcgttggcatagcgcagcggcgtggggttgccgtcgacggcaatcatccagccgatcccgatggccaggcagacgcctgcggcagcggccactgccggcagccagcgacgcggcgccggccgtgcagcacgtgccgcggcggtgcgcagccacgggtcggcggccagttcctcgccctgctggaacagggtctcggcctggatccaggcggtgacatgggccgggtcctcggccaaccagtcctcgaacgtctcgcgctcgcccggcgtacagtccggagcctccagccgcgccacccaggcgctggcgcgttcgaacagctgcgtatcttccctgggcctggcgtgactcatccgttgtccctgtcgttgtgcagcggatccgttccgagttcctggcgcaggccctgcagggcgcgggcgatgtgtttttccacggtcttggcagtaattccacagtgccgcgcgatctgcgtgtagctcatgccggtgatccggttgagcaggtacacctcgcgcgcgcgctcgggcagcttgaacagggcctgccgcagcagggacagcatctgcccggactcggcctggcgcaatggatcgggcgacgtgctggaaggctcgttgccgccatcatgttcggcgagggacagatgcggccgcgactgcgacgaacggccgcggtctgccaggcggttgcgggcgatacgatacagcagcagccgcagctcgtcggcactgtgcgcgcgatagcggatcagccgctccatgcagtcctgcgcgatgtcctcggcatcctccggcccgacaccgcgcgtgcgcaggaacgcacacaacggcgcgcgttcctcccgcacgaacgcaatgaacgcgtccgccggcgcggacaggtccggcgcgcgatggatcagaggagagggggcggacagggctggcctcggacgtcggtggcgggtacgtcttcgagttttacgcgacgatgaccggatggggaagagtgtgcgtggcccacgaatccattgtgaatgcgttcatgtttcgaggggcgctgcactgggggagggcgcaccgtccggacgttgaactttcgacccgtgcgttgcgggtggagagagagaacacatgaagcattcgaagttgagcctggccctggcagcgttgctgggcatcaccgccatggcggcggttgatgacgtcatggcaatgaattatcacgtgcaggacgatcgcgtcttcctcagcggcggcgtaaccgttgccgatgtggtggcgctgcccgcgctgctggccaaggcgcaggccgaaggacgcccgatccgcgaagtcgtgctgcgcacgtccaacggtggcgcgctgatcgccggcgagtggctgcaggcggtgatccgcacccagggcctggacacgatcgtgtccggccactgcatttcgtcctgctcgatcatgcagtccggcggcgtcaaccgttatctcggcggcgacctgccgctggtcgattcggtgcagatccatgccgccagcagtggtggcaggatcacctacgcaccgtcgccgcgcatgacccagatctacaccggcaactatggcggcggcatggatgccggcctgctgcacaaggccatgtatgaggtggtgcggcccaatggcctgctggtgttccgcgacccggcgcgcaccacgggtacctcggtcaccttcgatccggatggcagcggcagcaagctggagtccttccctggccaggacatccgcggcaacaacatcatcaacacggcaggctatcgcgatccgggcgacaccctgcgtgtcaccagcaacgtcagcggcgacatcaatccgggctacctgcgcaccgcgcgccagttgcaggctttcgtcgacgacgatttcgcgcgctggaacaccgactgggccagcacctacatcaactacgcggtgagcctgtacaacgtctccacgcggggaccgaacggcatcggcacgcagtcgctgcagcagctgcttgccgaccccgacctccaggatgagctgcgcggccagttgcggctggccgatctggatgcgtccaccctggcaggttcggcgggcgtgatccgtgtcagcaatggcgccacctggcgcaccgccgaaaccaccggcgccgatttcatgctggtcgacaacggcaccatcgcgctggagggcggcgcgctgcgcacccccgagctgcgggtgatgccgggcagcgtcgtggtcggccacggtgatatcgcatcggtcggtaccgacagcgatgcgttgctggatggcaccggcccgtcctggcgcgaagacggcttcaaccgcctgcgcgtgttcggcacgctgatgccgcgtggcggtgatctggtgacccacggctacgtcaacatcatgcccggcgggcaggtgctgttcgatgttaccgaggccggtggcaccggcagtggtcgcctgcgtgtcggcagcttctacgatggcggtgccgaagagggggcgctggtgatcgcgcagggcgcacacctggcgttgaacgtcgcccagggcttctatgccggcggctaccgccgcgatctggtggaagggccgatctaccagggcggtttccaggatgccgtgcgactgggcgacaccggctacagcgccagcatcaccgcgggcgaagtattccgcccgcgccacaattcgctgctgagcttcaacgtcaaccagacggccgacgggctgtggctgaccgccaacccgggcttcgatcagctgggcctgtttgccaacggcacctccggcgatggactggggcgcgcgctggcagccgcatcggatcgccaggacagcggcctgaagtcgctgctcggcgcactgcagttcgccgaccgcgatgtgatcgcacagcaggccggcgccctgcgcggtgatgcacacgccagcctgcgcctggccgacaatgcactgctgggcagcatcggcaacgtggtgcagcagcaccagacggcgatgcgcagtggcggcgatgccgatggcctggcctcgcaggcggcgcagtcggtgtcggcgcagccgggcatgcgccatggcagcctgttcaaccggctggccatgcatctggtcgagccggccggcgaggctgctggcgacagccgcgcggcgggtggcagccgtggcctgtgggcgcgcggtttcgccagccatggccgcatcgacgccgacggtggcgtggccggcctgagccataacatcggcggcatcgtggtaggtgccgacacgcacgtggccgatgaccgcgtcaccctcggcgtcagcgtggccgccgcggacatgtcgaccaaggccagcgatggctccggtttcagtggcgacgtgcgcgcgctggatgtgggcggctacctggatgcgacctattcgcgtggctacctgtcggcggccgtgcgctacaccgacctgcgccacgatacccgccgcagcctttcgcccatcgatggcctgcaacagccgctgcgtgcccgatacagcaacgatgcgatctcggcgcgggtcgaacacgcgttctccttcaccaccggcaagggactggtgatccagccgctgctgccggtggtggattacgcgcggacctcggccacccgcttcaacgaagagcagggcgctggcgcgctggtggggcgcagcggcagcctggagagcatccgcgtgggtgccggcctgcagctgttcaagaccttcgagggcaacaacggcgagcgcatcaccccgcgtgcccgcgtggcctggcagaaggagctgggcgattcacaggcgcgctacagcaccggttttgctgcggccccggacctggtgtttggtgccagcagccaggccgtgggcgaacaggtgctggcctggaacgtgggcgtgaccagtcgcgccagcgagcgcctgtcgatcatggccgactacgtgggtgagcgccgcgacgggcagatccggaacggcgtgatgctgggcctgggctaccggttctaaggggtacccggccccggcgatatccgtatcgccggggccatcccatcagggcgggtgctgcggtaaggtcggtagggaactcccgccaggccccgtcatgcagatcgccgtcttcagtgcccgcccttacgaccgtcgtttcctcgacgaggccaaccagcgcgatgcggccgggcagggctttgcgttcgtgtactttgatgccgcgctggacgtgcataccgctgcgttggcacaggactgcgccgccgtctgcgtgttcgtcaatgaccgcctcgacgcgccggtactgcacgcgctgcatgcactgggcgtacgcgccgtactgctgcgctgcgccggcttcaacaatgtggacctggccgccgcgaaagcgctggacctgttcgtcgcacgggtgccggcctattcccccgaagccgtggccgagcacgcgctggcgctggtgatgacgctcaaccggcagacccatcgcgcctacaaccgcgtgcgcgagggcaacttcatgctcgatggcctgctcgggcgcaccctgcatgggcgcacggtcggcatcgtcggcaccggcaagatcggcctggccaccgcgcgcatcttcaagggcatgggctgcaccgtgctggggcatgatccgtatccgtcgccggcctttgccggcgtgggcgacagggttggtctggatgaactgctggcgcgggccgacatcgtatcgctgcattgcccgctgacgcccgatacccagcacctgatcaacgacgcctcgctggcgcggatgaaggccggcgcgatgctggtcaacacgtcacgcggcgcgcttgtggacacccatgcggtgatccgcgcgctgaagtcgcggcggctcggccacctggccatcgacgtctatgagcaggaaagcgcgctgttcttccaggacctttccggcgagatcatcgacgacgaggccttccagcgcctgatgaccttccccaacgtgctggtgaccggccaccagggcttcttcaccgtggaggcgctgcaggagatctcggcgatcacgttggggaacctgcgcgattttgcggaggggcgggtgtgtgcgaaccgggtgagggcttagcagacacgatgcggaaatgggcctcgcccattcctcgcttggggtatttactttggatgaatatcatatgaagctgtcgtgaaggggcttgtgcccctgaaggtacaggggggcgcaagggacggcgcagctacttttcggccggaacatgacgccagcacacgtcggtggattaccgaacgtctggtgattgccgacgcatttgaacatagggatgttccatgcgtatctggcagtggcaggcgttgttgggcgcggcattggccatgtcatccgggtggacctgggcgagtagcccggtcaccccgcataccgagtactacaaaaagatcaagaacggcgaggggctggcaccgctgacctcgagcctgttcggggatagcatcagccccagctcggggtcgaccgaatttgtcgttaccgacatcgacctgccaggcaacaacgcgctgccggtgcgattgcagcgtcgcctcgctgtgcagtccttcaaggaccggcagccgttggggggattcggcagctgggacatcgaagtcgcctacatgcacgccaccttcgactccatctggaagtggaacgagtcgggtaatggcgccacccagcgttgctcgcagaccttctaccccaagacgcgtaccggcgtgggcaccttcgagatttggaccggcgtgcaggtgcgtgtccccgaccagggcgagcaggagatgctgctgatcgccaacgcctccaacccgaaacccaccaacggtgaaacctatcgctggggtactcggggcaacatgcgcctcagttgcctgggctcgacggccaatggctatcccggcgaaggattcctgggcgtggatgcatcggggaatcgctacttcttcaatgtggggattgaacgaacggctggcttcatggagctgggccaaggcatggggtccaagctggtgcgtgttctgctgatggccagccgggtcgaagatcgccacggcaactgggtagcctatgactattcgggcgacaagctggttggcattcgcggcagtgatggtcgcgccatctccattgcctatgccggggaccgcattgccagtgcggcagccaatggccgtacctggagctacgagtacaacgaaggttccggtgggatgggatttgcacgctggcccgcgctgcgcgccgtccagcagcctgatggcgcgcgcttgggctacgaatacagctggcaggacggtgggttcggtggcctgaatccggaatatcagagctgggatggcgaaccgaagctctgcaccaagcccacgttcgagcagtctggattcagcctgatcgcgacccacccatctggaacgcgtggacagtttgagttcaagtacctgcgccgcacccggctgggtgtaaaaagtaccgcttgcgcagacatgggcggtgggcgctacgcgcaacgcgcctccaatgcgttcgacctcttcgcgatcaccagcaagacgctgacggggccgggcttgggcaacctgacctggacctacgagtcgggtgggtatgactcgggtctaccgaattccgcggtgtcgacgatcgtggaaccggatggtacgcgccgtcacagtgtgttcggacgaaaactcgatgagaacgaggggcagttgttgcaggaggcagtgcgtgctccggacggtcagatcgtccaggtcaccaccaatacctatatgagttcggacgaggtccaggccggaccgttcccggacagctacggttcgatgaccgcagccgatgatcccttcgccgtcaagattcgtcccctgaagcaatctgtgctcagccaggatggcgtcaacttcgtcaacacgaccgatcagttcgacgcgcatgtgcggccggtggtgcagaccgagagtaactcgttgggacgctcgcggacgctgagaaccacctacttcgacgacaccggccgctggatactcggccaggtcgggcgcagcacacagagcgttggcggcgttgagatcgagaccgagcgcaccgagttcgactcgatggcgcgcccgcaacgtacctacgccttcggcgtgctgcagcagacgctgggctatcacgccgatggcacgctcgcctccgtggccgatggcaagggcaataccattgcgctgggcagctggaagcgtggcctgccgcagagtgttgcgtacccggacggcagcagtgcctcgctgcaggtcgatgacaatggctgggtgcgcgcggcagtggagcccaatggtgccagccggagtttcgactacgacgggatgggccggatcgtactggcgacccaggccgccaatgacagcgtggcctggaatccttctacaacgcaattcttccaggtgccgggcgcggagatcgggctggaagcaggccattggaagcgcgagtccagtaccggcaacgcacgcgcggtgacgtactacgacgggttgtggcgcccagtattggaagagtcgttcgacgctgcggaccgtggcggtacattgcgccagacggtgacccgctatgacagcaatgggcgcccggttttcacctcctatccgacgcgcacggcgtccgacttccgctcggcgctgcccggcacctataccggctatgacgcactcgggcgccccaatcgcagcgagcaggacagcgaactggggcggcttgtcacgaccaccgagcaacttggcggaggcagcgtaaaggtgaccaatccgcgcggcattgccaccaccaccgactacctgatgtacggcaagcccagccaggacacgcccatccggattctccacgctgagggagtggtgacggagattcagcgcgacacgctgggcaagccgctgtcgatcctgcggcgcaactacgatggcagcgtcagtgtgcggcggcagtatgtctatgacggcgcccagcgcctgtgcaagagcatggagcctgagaccggtgcaaccggcatgggctacgacgccgcaggcaatctgctctggtctgcctcgggcctgacgttgctgggccctcaatgtgagagcgaggctgcctatgcgtcgccttcgcgggctgaccggacctacgacagtatgaatcgcttgctgacgctgcgcttctcggatggccagggtgatcaggactggaactattggcctggcgggaaagtgaagcgtgtgcagacccgcaacaacggcgccatcaccaccaacgactacacctacaacctgcgtggactgcccacgtccgagagcgtggcctacgacggtggcgaggcctgggcgctgggctatggctacgatgcaaacggcgccttggcaacccatgtgcagccgtccggcctgacgatcgactacggcccgaatgcgctggggcagccgacgcgagccggagccttcgccatcaacgtgcgctattacgcgaacggcggcatgagcggcttcacctatggcaacggcgtcgtgcatcagatgacgcagaacgcgcgcggcctgcctgatcgcagcaccgacagtggtgcaggtggcaaggtcatcgatgacggctacgactacgatgccaatggcaatgtggcggccatcagtgacggcctgccggcagcccctggaaaccgcgacatgcgttacgacggcctggatcgtctgaccacggtgacggcggccagcttcggaaacgcaagctatgcgtacaacgttctggacaatatcgtcaccgccaacgtcggcgcacgacggcagtcctttgagtacgacttcaacaatcggttgacgaacgtgcgggatgtcggcagtggtgcgaccgtcaccgggcttggctatgacagccagggtaacctgaagatccgcaatggcgtcgtgttccggttcgactacggcaatcgcctgcgcgaggtcgatggcaaggaggcttatcagtacgatgcacatggccgtcgtaccttggccagcgcaaccaatggcaacattcgttccctctatgggcaggatggcgtgctgcgctatcagcacgaccagcgccaggccaagggctttgactacatccagctcaacggcagcctcgttgccaagcgtgccgtggatatcgcgcctgcagcattggtcgtaacggttccgggttacagcgcggacggtgcgtttgcggtgcagtggacagccgttgccggtgcgcagcgttacgaggtgcaggagtcgagtggcggtgactggcaggctgtctatcaagggcctgcgctgaacgtttcgctggccgggcgaagctccggcgtctatcgctatcgtggccgtgcctgcaatggcactgtctgcggcgcttggggtgtggaagcctccatccaggtggagcttgctcccaccgctgcgccggtgatcactgcaccggcgcaaggtatcaacggaacctattccctgagctggtcagcggtgcagggggccgcccgctttgtgcttgaggaggccgtgggtggtggttggaatgtggcctttgatggctctggccgaacctatcaagtgaccagcaagcctgcaggcacctatcgctatcgggtcaaagcatgcaatccacagggctgcggcgcctactcggccgaagcggcgattaccgcgctgtatgccccatccgtacccgcactgtcggtacccgctgcgagctacaacggcagctacgccgtctctgtttcgagcgtggcccaggccagcagctatcgcattgaagaacagttcaacgggggggcatggactgagatcaaccggatcagtgggaatcaactggtcattagtggacgaatcgccggcagttacgcctatcgtgcctttgcatgcaatgacgccgggtgcagcgcgtcaagcgccgtaggcgcgatcgtcgtgacattgccaccggtccaagccacgggaatcaatctcggcggtgtgagctacagttcaaccgtgagcatgtggtggggcgcaatccccgcagcgacgagctaccagctgatggaacagctcaatggcgggggcttcggactcgcccaggaagacggcgcgaccgccgtggcccgaggcggtcgctggccggggcagtgggactaccaggtgcgtggctgcaatgtcgccggttgcggaccgtggtcagcggtagcgggcgtgcgcgtgattggtcctccggcgaccccggtcctgcgcgtgccggatggggtgggaatcggcgcggcttactcgatctccctgctggaagtggcggacgcgacgcgctatgaaatcgacgaaagtactgacggcgccaactggtcgctgattgcgggggatcgaaccgtttccctgaataagggcggcggaggcaacttctactaccgtggtcgtgcctgcaatcccgcaggctgcagccccagttctgctgctggcctggttgcgatttccagtgcgccggccgtacctacgggtgtgaggatcgtaaagagcggccccaacatctgctcggtcatctggaatgcgtcgccgggtgccacctactacaacatgcgttcaagcagcggcggcgcgacctatagggcagaaggcatcggctacgacctcgatacgcgctgccagggtggttacaaggtgcgtgcctgcaatgcgcaggcgtgctcggcctggtcgaactgaggtggatatgaacacacggaagacaaagcaggtccccaagtggctggctgccatcgccatggctgtgacgacgtttgtagggactgcaacagcacaaacggtcacctatatccacaccgatgccttgggctcgccggtggccgagaccgatgcatccggcaacgtcatcaaacgattcgcctatgagccctatggagccgtcgttggcggggaagtggctgatggaccgggctataccgggcatgtgagcgatgctgcaacgggcttgagctacatgcagcagcggtacatggacccagagctgggtgtgtttctaagcgttgatcccgttacggcctatgttaagggtgatatgcggcattttaatgcctacgcatacgcctacaacaatccgtatacgtttaatgatcctgacggccgctgcggtgcatgtgatggattcagcgattcctatgcaagcatgtccactcccgaaagggagggtttgcgatctgcgatggtctcggctgttagggcggtagttacggcattcagtgaacttaactcacctgcatctggaggtggtgggaaggttggcgctgcaggcgcagtaataaaggaggctcaggctggaagcgctttggtgcgcgccaaagagatcaatggagcgctaaaatcgttcacgcaaaccaaggtaacaaccgccgtgactgagaccaaggagggagtgcgagttgtcacctccagtgaggggcggttgaggccggcgcagcgaaatgctctaaaggatggggaggttgctggaaagggagtccctggcgttcacgcagaggtcaatggtgtcaatagtgcaagaacaatgggcctcactccaacgagcgtttctccgagcaggcctgcgtgtcctggatgtcagtctgcaatgaagcaagaaaacgtaaaaattatcgataagtgaagaatggaaaactatccagccacgccatccttagcatcggacttcctccttctttccaattggcagcgattggcatttatggctagctgctgcgagaggatgattccaaactatcgcagatttagtgcccagacttcatttggggatgtaaacattctgcgtaacacccttgattctgtctggcttgaagtcattgggggggcggggagtcgcaatctcgaaagtctttccaaaggctgcgaggcacaggctccggatccatccaatttcagttcaatttatgcgtcttccgcgctggatgctgcagccgcaatttcaataaccgcctcagccgcagctactcatgccgaggtcacggccgtgatggatgtggttgaattggctagagactcagtggatttgtttgttcagattgttgaaaatctggatccaaatgctcctgaatttgaaaatagaatactaagaagcctcttgatgcagactgagctgaaacgacagaggcgtgccttggaaattctcaagtctaccggaagagaaaataaagtggcacgggctgaaatcgttaaacgatgggggcacgtggaattgccgagccttgctgcaacccctgaatcctagggtgacttgagcatgccattccattgatttatgcaagggggtggaattggcgcggtgtactcaaactctctgctggaagtggcggacgcgacgcgctatgaaatcgacgaaagtactgacggcgccaactggtcgctgattgcgggggatcgaaccgtttccctgaataagggcggcggaggcaacttctactaccgtggtcgtgcctgcaatcccgcaggctgcagccccagttctgatgctggcctggttgcgatttccagtgcgccggcagtacctacgggtgtgaggatcgtaaagagcggccccaacatctgctcggtcatctggaatgcgtcgccgggtgccacctactacaacatgcgttcaagcagcggcggcgcgacctatagggcagaaggcatcggctacgacctcgatacgcgctgccagggtggttacaaggtgcgtgcctgcaacgcgcaggcgtgctcggcctggtcgaactgaggtgggcgcgatgaacgcaggaatgaagatgctggtgagtcgaaccgtaggtggggccgcgctgattctgggtggactgttcaatcaggctgctgcggagacgattacctatatccataccgatgcgttagggtcaccggtcgctgagactgacgcggctggcagcgttatccggcgtaccacctatgagccctatggcgccgtggttggtgggtccgttgctgatgggcctggctatgcagggcacgtgagtgatgcttcgacgggcttgagttacatgcagcagcggtatatggatccaatccttggtgtgttccttagtgtggatccggtgtcgccccaaagcgattcggtgggagcattcggacgctacaggtatgccaattcgaacccatatcgctactttgatcccgatggccggcgagcatgtggcaaagacactgactgccagttggagcagggggcatacggtggttcttctgcaggtcgaggaacgatgggcacgggggcagtgggaagcaggcagtcaacttcggcgtcaccaagttacggtcgctctccgcaatcgactgatcctgcttggacgagagatcctgggctgaagcggcagatggagcgagcttggcaggactccaaccccgatgcgccaactgtattgtgggggcaacctggatcgctgaagcgggaacaaggagggtggatcgtggctccgaacctggttggcgcccctcaattgattcgtgctcaacctggtactcgtgctcaaatggggcaggatgtgcttttcaagccttcagagtttcagtgtggttgccgagttataggattcttccatactcacccgaatactcgggaagagggttatcgccctgcagctaacgggtatgactatcagttccttgaagaaatgggagtgcctgggatgattagaagtcatgagggttatgagttcgtacctatcatggagggacgcagatgaaacgctcagtcatcttgaaagtggggctgctgttttcattgctgatggcaggcggctgtgcagcgaaggagccccgaggtgagaaggggttggaagggctagaaagatgcgtgacgacaatcgagacttacgtccaagagacgaggggatggaaacgggagatgtatcgcattgcggaggagtcttccggcaccgcagatattggcttctcagtccagcacgtccatgacagggttctgctgccagaaggtggactgaagtcatttcatgttgatctcgaccagcgatgttccaaggtcatccgtgaaagccactatcagtagctggtagcggcttgttggcccatgaagagggtagatgcgcagccattgaccgcatgttgcttgtagtcctacaatgtccagctaggccggaatagctcagttggtagagcggcgcattcgtaatgcgtaggtcgcaggttcgactcctgtttccggcaccagttgtagttaaaagccccggcctttggtcggggctttttgtttgcgcccgccggttatcataggatggtgacctcactgaaggctgcaagccttcagcaacgtctcgtcatccccgcatcccgtgccagccaccacgcgagctgccggagataaccacccgctgctcccgccgatgcaccgatcagcaggtgtgcgagcaccctgatcccacgcgcggcccgctcccgcacccaaggcaggaccgccaccacctgcgcacccagcaacagcatcagtacgtccaggcccagcgcatccaccaccggcaacaacggcagcagatccggattgcaggccagcacgatcaccagcgcggcacccagcacggccatcaggcggcgcccggcgggcagggtggtccagtgcagcagtcggttgatcaggtgcatggcattccttgtgtcatgtgccggaatcctcatcaggcttgatcggccgcaccggctgccgcagcacggttttcaaccgcgccgcgtcggtcctgcgcgggtcgctcaggtagatctcatgatgggggccggcgaaggtgtaacccagtgcgggcatcacttcctcatgcagatgcgccaggacggggccttcgtcgtcgtaggcgcccacgtgcaaggtctgcaggctggggccctcggcaaggatttcattgcggaggctgggcggcgcatcccccagcttcgcgcgcgccttgctgatcgcggcctgccactgcgtagggccgatgccctcgggcgtgcggatcattacggtccaggcccactcgtccttgcgtcgcgcgatgaagctggccgggtcctcggcgctccacagcgcctccagcggtggcaccacgtagtcgcgcccttcggccttcagcgcaaacttcaatgcatagctcaccgaatacagccactgcacggcctgcaggtaggcgggggccgtgttcgggtcgccgcgaccatcgaccatcacgtagggcaggggcggcacatcgaccggtacgaacctgccggcgggcggttgatagagcgcccggttgcgcttcttgaagtcgatcttgtccatcgggggcttcctcctgtgcagagcatcccacgccaggcacccgccagtacgctgaaccggttcaggtgactttgccgaacgagggcgaatggccccacgagcgcgcggggccgcgacgcagtcctgggtcatgcgcccgtcacacctgcgcggtgcgacaacgtgtcgcagccagaatcgggcctttcctgcgctcgatcaatgtcaatgcctttcttaaatggtgggtgacggcctaaaattgaaaggctgactcgaccccacctccctgcctgtcttccggaccggtgggaccggcttttggccggaacaggcagggacggggaacggcattccctcgcaattggatcgaccgatgattccgttgaaaacccttgggcgctggttgcgcccgggcctgctgctgtcgttgctggtgatgctcaccggttgcgatgcggtggccatcctcagtccgaagggccagatcggccaggatgagaagaccctgctgatcacggccaccgtgctcatgctgctggtcgtcatcccggtcatcatcatgaccctgacgttcgcgtggaagtatcgcgcctccaacaccaaggcccgttacgagccgaagtggtcccactcgacggcgatcgaggtggtggtgtggtccattccctgcatgatcgtgctggtgctggcggtcctgacctggcgttcgtcgcacgcactggacccgtatcgtccgctggattcggacgtcaagccggtcaccatcgaggcgatctcgctggactggaagtggctgttcatctatccggaagagaaggtggcggtcgtcaacgaaatcaagttcccggtcaacacgccgctgaacttcaagatcacgtccgattcggtgatgaatgcgttcttcatcccgcacctgggcagcatgatctactcgatggctgcgatggagaccaagctccacctgatcgccaacgagaccggcgaattcccgggcatgtcctcgcactacagcggcgcgggcttcgccaagatgcacttcaccgcctactcggtcaccgatgccgaataccgccagtggctggaccaggtccgcgccggtgagcagaccctggacaaggcctcgttcaaggcgctgggtgaagcacgcaacgccgagtggtatccggtcacctacttcggcaagaccgaagaaggcctgttcgactgggtcatcgccaagcacatgggcgacaacaagcattacggcatgaagcactcgcatgccggtgccgccgctgccgatgccgccacccatgaagcgcacgagggccatgcccccagtgatgcgcatgattccaaggaatcgggtgaaaacctggatgccaacgaacacgaacacgcaggccatgccggccacgcgggttcgggagaatgaacatgttgggaaaactctctcttgagtcgatcccccacgatccgatcgtcctgacgacgttgatcggcgcggttcttggtggcctgggcgtcgtcgccctgatcaccaagttcaagctgtggggctatctgtggaaggagtggttcacctcggtggatcacaagaagatcggcgtgatgtacctcatcgtcgccttcgtcatgctgctgcgcggtttctccgacgccatcatgatgcgtacccagcaggccatcgccgtcggtggctccgagggctacctgccgccgcaccactacgaccagatcttcaccgcccacggcgtgatcatgatcttcttcgtggcgatgccgctgatcaccggcctgatgaacctggccgtgccgctgcagatcggtgcgcgcgacgtcgcgttcccgttcgtcaactcgctcagcttctggctgttcgtgtccggtgcggtgctgatcatgctgtcgctgtggatcggtgagttcgctgccaccggctggctggcattcccgccactgtcgggcatcgaatatagtccaagcgtcggcatggactactacatctggggtctacaggtcgcaggcctgggtaccacgctgagcggtatcaacttcttcatcaccatcctgaagatgcgtacccccagcatgaagctgatgcagatgccggtgttcacctggaccgccctggtgaccaacgtgctgatcgtcgctgccttcccggtgctgaccatcaccctggtgctgctgaccctggaccgttacctgggtacgcacttcttcaccaatgacggtggcggcaacgccatgctgtacatcaacctgatctggatctggggtcacccggaggtgtacatcctggtcctgccggcgttcggtgtgttctccgaagtcatcgcgaccttctcgcgcaaggcgctgttcggctacaagggcatggtctacgccaccgcctgcatcggcgtgctgtcgttcatcgtgtggctgcaccacttcttcaccatgggctccggtgccaacgtcaatgccttcttcggcatcacgacgatgatcatctcgatcccgaccggcgtgaagatcttcaactggctgttcaccatgttccgcggccgcgtgcacttcaccaccccggtgctgtggaccatcggcttcatggtcaccttcgtcatcggcggcatgaccggcgtgatgctggcgatcccggccatcgacttcgtgctgcacaacagcctgttcctgatcgcccacttccacaacgtcatcatcggcggcgtggtgttcggcatgttcgccggcatcacctactggtggccgaagatgttcggcttccgcctcaatgagttctggggcaagtgcgcgttctggtgctggttcatcggcttctacgtgaccttcatgccgatgtacgtgctgggcttcatgggcatgacccgtcgcctgcagagcacggtcaacccggcctatgagccgctgctgctgatcgccgccgcaggtgccttcatcgttggcgccggcatcctgtgtcagatcatccaggtggccgtctcgatccgcgaccgcaagaagaccgtcgacctgaccggcgacccgtgggatgcccgtacgctggagtgggaaacctcttcgccgccggccttctacaacttcggcacgctgccggaagtcaccgagctggacgatttctgggagcgcaagcagcgcggtgaagcctggccgaagccggccaagtacaccgacatccacatgccgcgcaacaccggcacgggcgttgtcatcggtgccttcagcctggtgttcggcttcgcgatgatctggcacatctggtggctggccatcgtcggcttcgtcggcatgatcgccacgttcatctaccgcaccttcgaccaggacgtggactactgggtcccggccgccgaggtggaacgcatcgagaacgaacaccgcaagcacctggaagcccagggcctggtgaagtcggagctgaaggcatgagcaccaatacctcgaccctgagccacgggcacgccgcgcacgcggcggcccatggccatgacgaccacgagcaccacgacaccggcggcaacaccgtcttcggtttctgggtgtacctgatgagcgactgcctcatcttcgcctcgctgttcgccacctacgtggtgctggcaggcggtaccgatggtggcccgaccgcgaaggacctgttcgaactgccgttcgtggcgtgggaaaccgcgctgctgctgacctcgtcgctgaccttcggcctgggcatgatcgccatgcaccgcaagcaggttggccagatgttcctgtggctggcggttacctggctgctgggcttcggcttcatgtgcatggaagtctatgagttccagcacctgatccatcagggctacggtccggaccgcagtgccttcctgtcggcgttcttcgccctggtcggcacccacggcctgcacgtcagcgccggcctgctgtggctgctggtgatgttcgtgcagctgaagaagtacggcctgaccccgaccaacaagacccgcatggcgtgcctgagcctgttctggcacttcctggacctgatctggatcggcgtgttctccgtcgtctacctcaatggagcgctgtaatggcacatgacaaccacgcacacgaccacggcaccggcggcgaaagccacggcagcgtgaagtcgtacctgatcggcttcgtgctggcggtggtgctgaccgtcatcccgttctggatggtgatgtcgggtgatttctcgcgcaccgtcaacggtgtggtgatcgcggtcaccgcggtgctgcagatgctggtccacctggtgttcttcctgcatctggaccgctcttcggaaagccgctggaacgtcaacgctgcggccttcaccgttgtggtgatcggcatcatcgtgatcggcaccctgtgggtcatgcacaacatgaacgtgcacatgatgcactgacgtcctcgcgacgttgccacgcagaaaggccgccctcgggcggcctttctgtttgctgtggttgcgcgtttcgtgcacccaccaggctggtagtgccggccgctggccggcaattacgcgaagccggccagcggccggctctaccaggagatccacgccatgcgtggaaggggtcagagcccttgcctgtgcaagagatcccacccggcatggccggcacagggtggtagtgccggccgctggccggcaattacgcgaagccggccagcggccggctctaccaggagatccacgccatgcgtggatggggtcagatcccttgcctgcggcaagggatctgaccccggacctggcgcctcaccccacccggcgcaggaattcctcggcgtccatcggtcgacccaggtggtaaccctgcaactgatcacaccccagttcgctcaggtactcgcgctgcgcctgcgtctccacgccctcggccaccacctgcagctgcagggtgcggcccagcgcgatgatcgacgagacgatggcggcgtcctcgtcattgcgctccaggtcgtgcacgaacgcacggtcgatcttcagttcggtggccggcatgcgcttgaggtacagcaggctggaatagccggtgccgaaatcatcgatggcgatgtgcacgcccatcgcggtcaggtcgttgagaatcgcgaggctggcatcgacgtccttcatcgccgtggtctcggtgatctccagggtcagccgcgccggttcgatccggtgccggtgcagcacctcgcgcacgctgtccagcagtgccggcgaggcgaactgcagcggcgagaggttcaccgccattgtccattccgtatgcccggcctggtgccatgcccgcagctgcgcacaggcgcggtccaatacccagtcaccgatcggcaggatcaggccgctgcgctcggcaatggggatgaacacgtccggcgccagcagtcccagctccgggtgctgccagcgcagcagcgcttcggccccggtggccggtgcgccggcggcagggaacttgggctggtaatgcaggatcagttcgtcgcgggcgatggccttgcgcaggtcctgcagcaggcgcagctggcggttggcactgagctgcatcgacggggtgaagaaggtgtagccgttccgcccggtttctttggtgtggtacatcgccgcatcggcgtgggccatcagctcgcgctcgttgccggcgtcatccgggtacagggcaatgcccaggctggcgctgacctgcagttcggccgcatccagcaggaacggttcgccggccgcggcgatgatgcgctcggccaccaccaccgcatcgtcgggaatgtcgatggccagcacgatcacgaactcatcgccgccgaggcgggccaacgtatcctgcggtcgcagctggccgccgatgcgctgtgccaccgccaccagcaggcggtcgccgagctggtggccgtacgcatcattgaccgccttgaagccgtccaggtcgcagaacatcaccgccactgcatggttgcggcgccgcgccttctcgatggcctgctcgatgcggtcctgcagcagcatgcggttgggcagctgggtcaacgggtcgtgcagcgcggcctggatcagcttgtcgttggcgtgcgccagcgaatcggccagcagcccggtgcgcacgcgcatctgccggtcgaacagcgaggcgaccagggcgatgcccagcgtggccacggtggtgacgatcaccagcaccgccagccagcgcgtgtcgatgccgccactgccgacggcgccacagatgctgccttcggggaagcgcgccgccgccatgccggtgtaatgcatgccgacgacggccaggcccatcaccagcgaagcaagcgcgcgcagcagcagggtgttgcgccgctcggcgcgcaggcggaaggcgatccacagtgcggcgccggcggcaccgatggccaccgcgatggacgcggcaaaccagcccgggtggtagtcgatgccgggctgcatgcgcatcgccgccatgcccaggtaatgcatggtggcgatgcccaggcccatcagcacggccccggccagcagccggcgccacggcaggctgggccgcgacaccagccacagcgcatacgccgaggcgccgatcgagaccgccagcgagtacagggtgatgccaaggtcgtaacccaccggaatcggcaggtcgaaggcgagcatgccgatgaagtgcatcgaccagatgcccaggcccatggccgccgcgccgccggccagccaccagcgggccacgcgaccctcggccgtggccaggcgcccggccatgtccagcgccgtgtacgaagcaagaatggccaccagcagggagatgatgaccaggctctgactgtagctgccagtcatgatgaatccagtgggggagggaggggcgcccgcaaggcgcacgcccgcgacccctatcggcgcaggtgggcaggacttgagtggtcgcagcacctgcgacccggctcggctatcctgccacgcctgttcccgttgctggaaatcatccgatggcaaaagcccgcaccgcctacgtctgcaatgaatgcggcgccgaattcagcaagtggcagggccagtgcaccgagtgcaacgcctggaactcgctgtcggagatcgtgctggaaagcgcggcggcggccaaggcgccggcttcgcgccgggccggctgggccggcaagatcgacccgccgaagatcaccgccctgaaggacgtggagcagaccgagcatcgccgggtctccaccggcatcggcgagttcgaccgggtgctgggcggtggcctggtcgagggcgcggtggtgctggtcggtggcgatccgggcatcggcaagtcgaccctgctgctgcaggcggtggcgaagatggcggccgaactgccggtgctgtacgtcaccggcgaggaatcgctggcgcaggtcgccggccgcgcgcaccgcctggagttgccgctggacggggtcaacgcgctggccgagaccggggtcgaatcgatcctgcagcatgcgtccaaggccggcccgcggctgatcgtggccgactccgtgcagaccctgtggaccgagagcctgaccgctgcgccgggatcggtcagccaggtgcgcgagagcgcggcgcggctggtacggttcgccaaggagaccggcaccgccgtgttcctggtcggccacgtaaccaaggagggcggcatcgccggtccgcgcgtgctcgagcacatggtcgatgcggtgctgtatttcgagggcgagagcggcagccgcttccgcctgctgcgcgcgttcaagaaccgcttcggtgcggtcaacgaactgggcgtgttcgcgatgggcgacaagggcctgaaggaggtctccaacccatcggcgatcttcctgtccggcggcagcacccatcagccgggaagctgcgtgatggtcacccgcgagggcacccggccgctgctggtggaggtgcaggcgctggtcgatgcgtcgccgctgtcgaatccgcgccgtgtcgcggtcggcctggagcagaaccgcctggccatgctgctggcggtactgcatcgccacggcggcgtgctggtcggcgaccaggacgtgttcgtcaacgtggtcggtggcatccgcgtgcaggaaaccgccgccgacctgccggtgctgctggccgtattgtcctcgctgcaggaccggccgctggcggaaaagacgattgcgttcggcgaggtggggctgtccggcgagatccggccggtgcccaatggcgaagaccgcctgcgcgaggccgccacccatggcttcaagcgcgccatcgtgcccaaggccaatgcacccaagggcggatcggtgaaaggcatggaagtgatcgcggtggagcgcctgtccgaggccatcgacgcggcgtgaggcacgggggggactgctgcggggcctgcctccacatacgtcatatacggcaacggtcaggctggctgtgctagtttttcccgctcgacgaaggcgccctctggcgcctttccgtgcccaggagtaaacgattacatgcaggacaccgcgctcaccgcccccaacgccgagatccgtcgtgccggggtcgatctcaatggactgatgacggtgctgggcaagcacctgtattccaccccggtggtggcgctgcgcgaactggtgcagaacgcgcacgactcgatcatccgccgccgcatcgagcagcccggcgtccaggtgccttcgcgcatttcggtgcaggtcgatgccggtgccggcgtgctgcgcatcaccgataccggtgccggcctgacccgccaggagatccacgactacctggccaccgtcggcgtcggctatacccgtggcctgcgccagggcggcgaggatgatgaaggcctgatcggcatgttcggcctcggcttcctgtcggccttcgtgctggcgcgccgggtcagcgtgcgtaccacctcgtaccagacgccggagctgggccatctgtacgtgtccagcaatgccgagcagtacaccgtcagcgaagtgccggcacgtgcggtcggcaccgaggtggaactggagctgcatccggacttcctgccgctggccaacgaggcgcgcctgcatgaggtgctgggccgctactgcgcgctgctgtccgaaccgatcttcatcggtgctgcgaccgaagcgctcaaccccgagccgccgccgtggcgggggcagggtgacgtggccgtgcacccggtgcaggcacgccgccaggcactgcagttcgccgcgcgcttcgagcacgatttcgagccgatcgtcaccgtgccgctgcgggccgacggcaacagcgatgccaccggcctgctgtgggtgcaggatggggccacctatggcaccagcgacaaccgcaacctgtcggtgttcgtgcgcggcatgctgctggatgacgatgcccgtgacctgctgccgccgtgggccggcttcatcggcggggtgatcgaatcctcgcggctgactcccaccgccagccgcgaagacctgcagcgcgatgaccagtaccgcgctgtgcaacatgccttgctggaggcgctgatcgatggtctggccgacgttgcgcggcagcagccggaggcgtggcgacgcgtattgagccgccacaacgaggcgctgctgggcgcggcgctgtgcgatgaccgcctgttcgacctgctgatggagcatgtgcgcgtgccgacctcgcagggcgacctgccggccagtgccctgccggcgcgcggtgccgtgcatgtcatcctcgacaatggcggtggcttcgaagagatgctgttccgcgcgatgggggtgccggtcgcgcatggccatcgttacgcggtggtgccgttcctgcggcgctgggcccaggccaagggcctgcgcctggttgaactcggcaccgagcagggcaatcgcgcactgttccgcagcgatgacagcctcgacgatgcgcagctggcctggctgcgcgaacagctgggtgatggcgagcagctgctgccggcgcgtttcagcccggaagcactgccggtggtggtggtgcccgaccgcgaggccgaactgaagcagcgcctggaagacgacgagaacgacaagcgcgtttcgatggcggcgctgcgcctggcgcgccagttcaccgcacgcatcgaatcgcgtgcaccctcgcggctgtacctcaacctcgacaacccggcggtgcaggcgctgctgcgcgcccagcgcgagggccacccgcaggccgaagcggcggcacgcctgctgcgctcgctgaagatcatcgtcgctgcgcagggccgtcccttggcccgggcaacgaccgccacgcagggcccggatctcaacggcgcctttaccgatatcgccggtgccctgcagcagatgctgcgctgagcaccgcgccctctcatccagccttcgctagacaggagtacttaccccatggacatctggaactgggtcgaaaaactgcagggcgacctgcgccaggccggccaggcgcagaacgcgcacctgctgaaccgcctcgccgacgaggtcagtgaactgcagatcgaccgcgtcgatgcactgctgcccgaagcacgcgcactgggcaaggcgctcgacaacccctgggtcgacgtctacgtcggccactgggcgctgcgcaaccgcgtcggcaaccgtgttgaaggcgagagcgcacttggcgaagccgtttcgctgttcgagcgggcacaccgcgaagacaccctggaatgcccgcagtcgatctgcgtgacccaggacctggccgcctgctacggcaacattgatggcccgggctgggtgcccgagcgcatcgaggtgtgcgacgagaccctcggccgcatcgatcccagctgggcctgcttccagtgcctgagctgcgagaaagccgatgcgctgctcgacgatggccgtggccaggaggcgctggattacctgcaggcgcaggccgacgccgtggaggcctgtggcaaggaagtgttcgacagcttcccggagatgcagatcaagatcctgctcgctgtcggccgcgccgacgaggcactggcgctgatcgagaagcgcgaagccgaagtggccgcctccggggagtacgagccggccaactgcacggtgccgcgccgcttgtccaaggcatgggcgttggcccagctgggccgcgacgaagaagcgctgcagcagctggtgccgtggagcgagctgaccccgaactactggcggctgtgggcgaacaccgccgcagcgctgtgccagcgtgaccctgcgcgcaatacgtgggacctgggcacgcgcttcaacacgatcatcgagcacttcgcctgggtcggatcgcatcgcctgctgatcgaagtggcagcgctgagcctggagcttgcgctgcagcgtggtgcgcgctgggtggcgctgcgccagctggaactggcccgcacccatctggcgcagctgcgccaggaccggggggcggcagcgctggtggccggcctggcggcacgcatcgatgcattgccggatgtcgcaccgctgccggtgccggccggcgagctgctggcatggctggacgcgcagggcgaacagaaccaggcgcgcgaccccgagcgcgaggcgcagtggttgctgcaggcgcaggcgcagctgcccgatgacgaggccttggccgagatggccgcctcggcgctgagcgcctgcggtgcgcaggccgaggcgcgagcgctgttgtggcggttcgtacgcagccatgcgcagaacgatggtcccgcagcctacacgctgatgcgctggctggccgagcagggggacgacgacggcctgcgccagctggccgaggtctaccgcagcagcgtgccggtgttcgcgcactggtgcgacgtgcagcgcgcacgccgggtgtccgactggccggcgctggagcaggcggcccgatcgcttctggagctgtctccgggctcgcacggcgcgcgcggcacgctggcgcgcatgtacatggaaaccggccgcttcagtgaggcccaggcctgctatgcgcagttggtggagctgctggacgagccgaacgccgcgcattgggaccacatgagtgcggccagcgcggcgcgcgactgggacgcggtgcgccgctcggccgcggcgatcggcatggagctgtccagccaggaaggtgtggtcgaggagccatggggctgggtgatcatccgcagcgaagagaacggcgagccgatggagtactacgcccgccgcagcggcccggtgaccgcgcgcatcgtcgagaatgcgccgtccaaccgcgcccagcaggtgggcgactgggtggtgttcgatgccgcactggtgcatccggcacccgaggaggaggaagcgcgcgagcatttcatcccgacctatgcgcaggtgcatgtgctggagcgcggcggcttcgcccgcagctggatgatcgatggcgcgcacccgggcgaagaggcgtggaatgccttcgtcgaggcggccgaagcacagggttggaaggtgtggtcgcacagccgcccggactacactgtcaccgaccccgatagggaggagggcacgctgcccggcctgctgttcaccgtcgcccagccgcaggaccatgcgccgctggcgctgcaccgcttcctccagcagcacaccgcgacgtggccgcatccgcattgctggctgcgcctagctgaagcctgtgaccaggatcgccagccgcatctggacgtgatcgagcgttacgggctgtaagctgcacgctcctgtagagccgagcctgcgctcggcccacgcggaaagcagccgagcatgggctcggctctacaacggatcatcatcaccaccagggaatggaatacatgcgaaaggcagggatgttcgtgatcgccgggctgctgctggcccccaccgtgcaggccgcaccggcctgccaggaacccatggccgttgcccgtgccttcttcgaagccacgaccggcaatggtgacctgctggagccaccgcccgcgctggtcagcccggcgttcggcaaggcactgcgtggcgagcgtgcctgccagcagcgcgaagagggcatctgcacgatcgattccgacccgtggctggatgcgcaggacggcgacattgaaaccccggtgcgttatcgctggaaagaggcctcggccactgccggccaggtcgagatgcgctatgcggtatggaagaaggcctacgtgacccgtctgccgatggtgcgccagggccagggctgctggcaggtcgatgacatcctcaccaacagcggccgttcggtgcggaagatcctggcgcagccggtgccctgaccggcggcagcatccacgcagggtgcggtccagttgccggccagcggccggcactaccaggtgatgttgggtgggtgccgaccgttggtcggcatgcctttatcgcgaatgcccgaacaccagttcgatcacgaactggctgccgaagaacgccagcagcagcaacagcattgccgccagcgtccagtgcaccgccttcatgccgcgccagccgtagcggcgacggccgatcatcagcacgccgaacacgatccacgacagcacgctcagcacggtcttgtgcaccagcttctgcgccagcaggtcatcgacgaacagcacgccggtgaccagggtcagtgtcagcagcgcgaagccgaccgtgatcacccggaacagcagcgattccaggtcggccagcggtggcagcgcgcgcagccacgggcggaactcgcggcggcgcagggcgcgttcctgcagccacagcatgatcgccagcagcgcggcgatgctcagcgtggcgtaggccagcagcgccagccaggcatggctggccaggcgccagcccagcaccttgctcggctcgtggccgtagccgtgataggccagaagcagtaccgcggccagtgggaacaccaccacgcccagcgccgacatgcggccgcgcgcgcccaccagcgaggtcagccaggccatgcccaggccgaccagcgacagcgcggcgaagaagtgcatgtccggcccgccgttggtgcgcatcgccaccatcacgtggtaaccgccatgcagcagcatcgctggcagggccggccacagccaggtgggagagccggtgctttcatcgcggccgagcgcgcgcaccagcagggcactggcagccaggtagagcaggacggcgatgagaacgattgtcatcgttgcagtttcgcatacccctgtgatgctggcgacggcccggtggtcgcagtccgggcggacagccggacccgttatactgtctgccttattgtcccccgctttcagacaggttgcgccgcatgttcgagtccctgacccagcgcctttccggcaccatcgagcgcctgcgtggccgcggccgcctgaccgaggagaacatccgcgaggcgacccgcgaagtacgcatcgcgctgctcgaagccgacgtcgcgctgccggtggtgcaggccctgatcgagcgcatcaaggtgcgcgcggtcggccaggaagtgctgaagtcgctgaccccgggccaggccctgatcaaggtcgtgcgcgacgagctgaccgcggtgatgggtgccgaggccagcgacctgaacctcaatgtgcccgctccggccatcatcctgatggcgggcctgcagggcgccggcaagaccaccacggtgggcaagctggccaagcacctgaaggaaaagcgcaagaagaaggtgatggtggtttcggccgacgtctaccgcccggccgcgatcgagcagttgaagaccctggccgagcaggtgggcgtgctgttcttcccgtccagcgccgaccagaagccggaagccatcgtccgcgctgccatcgacgatgcccgcaagtcgttcgtcgacgtactgctggtcgataccgccggccgcctggccatcgacgaagcgatgatggccgagatcaaggccctgcacgctgcggtgaacccggccgaaaccctgttcgtggtcgacgccatgaccggccaggacgcggccaacaccgccaaggccttcggtgatgcgctgccgctgaccggcgtggtgctgaccaagaccgatggtgacgcgcgtggcggtgccgcgctgagcgtgcgctacatcaccggcaagccgatcaagttcgtcggtgtcagcgaaaagccggaaggcctggacgtgttccatccggaccgcatcgccagccgcatcctcgacatgggcgacgtgctgtcgctggtcgagcaggtggagcagcaggtcgacaaggacaaggccgccaagctggccgagaaggtcgcgaaggggaagaagttcgacctgaacgacatgcgcgaccagctcgagcagatgcagaacatgggcggcatcggcggcctgatggacaagctgccgggcctgggcaacatccccgaccacctgaagcagcaggtcagccagggcaaggaagtgccgcgcatgatcgccatcatcggctcgatgaccaagaaggaacggcgcaacccgaacctgctcaacggctcgcgccgcgcgcgcatcgccaagggttcgggcgtgaccccggccgacgtcaacaagctgatgaagcagtacatgcagatggaaaagatgatgagcaagatggccggcggtggcatgaagggcatgttgcgcagcatgaagggcatgatgggcgccatgggcggccgcggcatgccgttccgttgatgacggccccggtcgcagtgtgatgtagcgcccgagctcacgctcgggcggcggcgcgcaagcgccgcagcaggtggtcgggcagcaggctcgacgccacccctgtcccgcgcgcaccatgggggcctgtccgaaacgatgggccgtcatgcagagttccgctgtaacttcccgcgtcgaggcgttctgccggcgctttggcatttccgttccgatcctgctggcaccgatggccggtgcctgccccgtaccgttgtccgccgcgctggccaatgccggcagcatgggggcgatgggcgcggtgctgtcgtcgtcggccgatatcggtcgctggatggaggacttccgcgcgacctccaccggcccggcgcaggtgaacctgtggctgccggaccccgcaccgagccgtgatgtcgctgccgaggccgccagccgcgctttcctcgcgcagtggggcccggacgtgccggccagcgccgccgacgccacgcctgccgatttcgaagaacagttcgctgcgttgcttgcggcacgcccggcggtggcgtcgaccatcatgggcgtgctgctgccgcgccacgtgcagcagctgaaggacgccggcattgcctggatcgcctgcgcgaccaccttgtccgaagcgcgtgccgcacaggacgccgatgccgacgccgtggtggcgcagggcatggaggccggtggccatcgcggtgcgtttgatccggcaatggccgaacgccagctggtcgggctgttcgcgctgttgccgcgcctggccgatcacctgcagattccggtgatcgctgccggtggcatcgccgatggccgtggcattgctgccgcactcaccctgggggccagcgccgtccagatcggcaccgccttcctgcgcacgcccgaggcggcgatcgcgtcggcgtgggccgatgggctggccgccagcgaaccggaagatacctggccgacgcgcgcgttcagcggccgccttggccgtggcctggcgaccgcgtatgtgcgcgccgctgctgccgaaggcgcccctgcgccgcgcccgtacccggtgcagcgtggcctgaccgcgccgatgcgcaagcaggccgtgcaggaaaatcgcctggcggcgatgcaggcctgggccgggcagtcggcgtggatggcgcctgcacagccggccgccgacgtgctgcgcggcatgtgggaacaggcgcaggcgctgctgcgatgagggtcacctgcaatggccagccggcgcaggtggcggacctgctgccggcgctggtgaactacggccacttcacctcgctgcaggtgcgtggtggtgcagtgcaggggctggacctgcatctggcgcggctgtcgcaggccacgcgcgaactgttcggcagcgaactggacacggtgcaggtgcaggcgtggatggcgcaggcgctgcggcaggccggcctggccgatgcctcgctgcgggtgacggtgtactcgcgccgcttcgatttccgcaatccgctggcggccgtgccggtggacgtgctggtggcagtttcagcgccggtggccctggccgcgcccaagcgcgtgcgcagcgtggcctggcagcgcgaaatgccgcagatcaagcatgtgggcacgtttggcctgtttgccgagcggcgcgcggcgatggcgcaaggattcgacgatgtgctgttcgtaaccgccgatggcgacgtgagtgaagggagcacctggaacctggccgtgcacgatggtgaacggctgctctggccgcaggcgccggccctgcgcgggaccgccgaggcgctgttgaagcagcattggccgggggcacaggcgacgcagccgttgcggctggcggacctggccggtgtgaagagcgcgtttgcctgcaacgccagcggtctttgggcgctggacgccattgacgggcatgtcctgcccggctcgcatgccttggctgaacggggcagggcagtgctggcggcggtgccttgggacagattggggtcagatcccttttgcggcgcaaaagggatctgaccccgggcgggaccccgggcgagttcccccggggttggctcggccgggctctgccgctataatcgcccgcttacctcgccatcctggcgactgggcaataggaaaaacaccatggtcaagattcgactgacccgcggcggcgccaagaagcgtccgttctaccacatcatcgtcaccgacgtgcgcagcgcgcgcgacggccgcaacatcgagcgcgttggcttctacaacccggttgcccagggcgccgagaagcgcatcgagctggacctggcccgcgttgaccattgggtcaagaacggcgcccagccgaccgacaaggtccgcaacctgatcaaggaagcgaccaagtcccaggccgctgcggcctgatcctgacgggccacgcttcggcgtggccctcttggttgaagcagatgaaagatatcgagcgccgcatcctgctgggcagggttgtcggcgcttttggtgtgcgcggcgaaatcaagctcgagtcctggaccgagccacgttccgccattttccgttaccagccgtggatcgtgcgcagcccgtccggcgtggaaaccacgattgaaggtgtgcgtggccgcgacagcggcaagcacctggtcgcccgtttccccggcgtcgaggaccgcgataccgtcgaagcgatgcacggcaccgagatctacgtggcccgcagtgcattgccgccaccgaagcccgatgagtactactgggtggacctggaaggcctggacgtgaagaccaccgagggcgttgccctgggccaggtctcgcacctgttcagcaccggagccaacgacgtggtggtggtccgcggtgaccgcgagcggatgattccgttcgtgcagccggacttcgtcaagtcggtcgacttcgaggccaacctggtcgtggtcgactgggatcccgagttctgagcgtgagcatgcgtttcgacgtcatcaccctgttccccgagttcctcgcccagtccgccggactgggcgtggtcgggcgcgcgcaggagaaggggctgttcagcctgcacggctggaacccccgtgattacgccgaaggcaactaccgccgcgtggacgaccgtccgttcggtggtggcccgggcatggtgatgctgatcgagccgttgcaggcctgcctgcaggcgatccgtgaggccgatccgaccccggcgcgggtgatctacctcagcccgcagggggcgccgctgacccaggccaaggtgcgggaactggcggcgctgccgcgcgtggtcctgctctgcggccgctacgagggcatcgacgagcgtttcctggaggccaatgtcgacgaggagatctccctcggcgactacgtgctgtccgggggtgaactgggcgcggcggtgatcatcgacgccgtggcccgcctgcaggacggtgccctgaacgacgccgaatcggcggcgcaggacagcttcgagggcgacctcggcctgctcgactgcccgcactacagccagccggcccagcacccgctgggtgacgtgccggacgtgctgcgctcgggcaaccacgcggccatcgccgcctggcgccgccagcagtcgctgctccggaccgccgagcggcgcccggacctgctggatgagcagacactgggcaaggccgaccgcaaactgctggagcagggccgtcaggcccggaaccagaaggccagcccctagcgcagggtcggctttatcggctatcatggccaattcccgtcggccctggtcggcgcgcgcagtacccaaaacaaacgtgcagcacagtccggtgactgcatgagcctacgttgtcgatacgacacgcccacccgaacaagaatcggtgtaacccatgagcaagctgaacaagtccatcgtcgcggaattcgaatccgcccagatcacccgtgaactgccgaagttcagccagggcgacaccgttgtcgtcaacgtgaaggtgaaggaaggcagccgcgagcgcgtgcaggcctacgaaggcgtcgtcatcgccaccaagaacgccggcctgaactcctcgttcaccgtccgcaagatctcgcacggctacggcgtcgagcgcgttttccagacccacagcgccatcatcgactcggtcgaagtgaagcgtcgtggtaaggtccgcgccggcaagctgtactacctgcgtggcctggaaggcaaggctgcccgcatcaaggaagacctggctgccgctgctgccgccaaggctgcccgtctggccgacaaggcctgataaacaacttcggttgttgccgcgacggccaccttcgggtggccgtttgcgtttccggcatcgcatcggccacgatcaggtgatgaacgacatcaaccttcgctatccggccgtgatccagtcggcgttgcgctttctcgacggcaaggggctggcacgcgtgcaatcggcgccgttgctgcatcgcctgttgtggcgcctgggcatcgcactgccgccaccgatcctggccggctttggcaccaacgcattggtgcagggcctgctgttcgggctgttctggaccgcgctgatgtggctgatgctgtggcagggcagcgaccgtccgctggtgctgttgctggtggccggtctggtggccggcgcgctgttcggccttgtgatggcggcgctgatgcgctcgctgcgccgccaccgcaagctgccggattggcgccagttccgggcgcggcaggcggactgagccgatggcgcactgcgccgtgaccgctggctacgggccgcgctaggctgcggtttcatcccgatggacgtgccgtgcgatgcctgccaagcgaaccgcaccttccaccgcgcccacgctgttgtccggcggcaacccccggatcgccaagggcgagggcgatgctccggtgcaggcatacatcgccgccatgccggactggaaacgcccggtcggcgcacagctggatgcgttgatcgaacgggccgtacccggcgtgcacaaggcggtgaagtggaactcgccgatgtatgcggtggcgccgggcgaaggctggtttctcagcttccattgcttcacccgctacatcaaggtggcgttctatcgtggcgcggtgctgaagccgatgccgcccgagccgtccaggagtgccgatacgcgctacctgcatatcgcacaggatggcgcgctggatgaggcacagttcctcgactgggtgcgccaggccgccgcgttgcccggcgagcgcatgtaagcccaccgttctgattcctttcccgacgagaaccgctgatggccacgcacgcgccgaaccctgacgatgccggaaccccggcgaccgaactgatcgatgcacgcatcgccgaactgggagactggcgcggcgaaacgctggcacgcgtgcgtgcattgatccatgaagcgctgccggacgtgcaggaagcctggaagtggcggggtacaccggtgtgggagcacaacggcatcctgtgcaccggcgaaacctacaagcaggcagtgaaactgaccttcgccaacggtgcggcgctggcggacccgaagggcctgttcaacgccagcctggagggcaacacgcggcgtgcgatcgacatccatgaaggtgcgaagccggatgccgctgcgttcaaggcgctgctgcgcgcagcggcggcgttcaacgcggcgaagaagaaacggtagagccggccgctggccggctgttgcgcgatgctgctggagaggtgtgaggttgccggccagcggccggcactaccttgtcattggccggtccatgaggttgccggccagcggccggcactaccgtggcggtgcggcatccgggtcggccaccggcgacggcggacaggccggaatctccgacggcgtcgccagttcttcggcatgcgagggcttgcccatcatcttcgccttgcgccagccgccccagcggtaatacgccagcgacagcagcatcgacaccagcgagctgaccgggaagctccaccaaattgcatcggcgccccagtacggctgcagcagttcggcgaacggcacgcgcacgccccacagcgagccggccaggatcagcagtggcggaatcaccgcgccggtggagcgcaccacgccggagatcacgaagctgacgccgaagaacaggaacgagccgatcaccacatggttgaggtggcgggcgatgtccagcgcctggctggccggcggcaggaacagcgccagcagctggcgatcgaacacaaccaacggcaggatcagcgcgccggtcagcaggaagttgaacagcacgccctggcgtgcggtaccgcgcacgcggtcccagcgctgcgcaccgacgttctgtgcggccatcgaagaacacgccgcaccgatcgccatcgccggcatctgcaggtagttccacagctgcagggacgcgccgtagcccgcggcggtgtcggtgccgtactggttgaccatggtcatcagcaggatcaccgacagcgagatcagcaccatctgcaggcccatcggcacgcccttgaccaccagcgccttgaggatggtcatgtcgagcttgaacaggcgcaggtcggcgcggcccagccacagggtgtggcgcttgtgccgcatgtacagcagcaggccggccagcgacagcgtctgcgcgaccagcgtggcccaggccgagccggcgatgcccagcgcggggaagggccccatgccgaagatcagtacagggttcagcacgatgtccagtgccaccgataccatcaggaagcggaacggcgtgcgcgaatcaccggcaccgcgcagggcggcggtgaggaaggcgaacgcgtacagcgtcggcatcgccaggaagatgatctgcaggtaggcctcggccaatggcagcgaggcggccggcgtgcccatcgccgccagcagcggatgggccatgaaccagccggcgatggcgatgatcaccgacaggccgatgaagaaggtggcactggtgccgaccacgcgccgcgcctgcgcgatgtcgcgcgcgccgatcgcctgtccgatcaggatggtcgaagccatgccgaagccgaacaccgagccgatcaggaagaacatgatgttgttggcgttcgcggtggcggtcagtgccgcctcaccgaggaagcgcccgacccagaccgcattcaccgaaccgttcagcgactgcgcgatgttgcctgccaggatcggcagggaaaacagcaggagattgcggccgatcgggccggaggtcaggtcaagcggcgctttggccatggagtggtgatcgaatcccgggaggcgcacactagcaccaagccggtttgcgggatgtggcaatgcatcaacgactgcaggtgaagtggagcctggcgctggccttgatcagcgtcgtactggccgcatgttcgacaggtgaccggctgggcgatacccaggtgcggcccaccgaccggcccgagtgcctggtcggcagccagcgccaggatctttctgccggcgtacccaccctgatcgggggcagcggctgccgcaccgaccccgacaacccgcgtcccctgaacaagcgaacggagtagtccctgccgatgaccgagctttccccgctgccgcccagtgtccgcctggacatctggctgtgggcggcccgtttcttcaagacccgcagcctggccaagcaggccatcgagaccggcaaggtcagcgtggctgggcagcgcccgaaatcctcacgcgcggtgcgcgtcggcgagcagctgcaggtggatcgcggcgaggagcatttcgagatccaggtgctggggctgagcgatcagcgcgggccggcgccggcggcgcagcagctgtatgccgagagtgaggcctccagggcccgccgcgccgagcagcgggcgctgcgcatcgccgcacgcgatggtttccagccgccggagcacaagccggacaaacgcgcacggcggttgatccgcgcgctcggcgatatcgacgcgttgtaagttgcagggcgccagaccgggtccggcgccgccttggctcagcgcttgccgcccagcaggctgccgccgatcttcagcagatcgcccacgccgagctggccgtcaccgtcctggtccagcacgctgccaagcaggccgccggcaaggccgccctgttgctgcacctgctgcttctcctggccgagggcctggctgagcgagccggcatcggcctggccaccaccgaggcgctgggcgaggaaggccatcacgatcggtgcgaggatctgcagcagctggctggtacggccgctgtcgagctgggtggcctgggccaggccggtttccaccttctgctggctgccgccgaagatgtggccgaggatgccggcaccgtcgctggcggcgccaccgccaccgccgcccagtaccgagccgagcacgctgcccaggtccaggccgctgtggttgttctgcagtgcaccgagcagcgcctgtgcgccctgcggctgcgaggcgttgttgcccagcgcgcccatcagcaccggcagcgcggcactgatcgcaccggaggcctgggtatcgctgatgccgagctgctgcgatacctgctgcagcggggcgccctgcaatttggcgagaagttcgtcggtcaggctcatctgcggaatccttgattggggttgggcgtgcagaaggtacgacgcagaccgttaaaacggcgacgccgcctcacggggaggcggcgtggcgttcccggggcggggcgatcagagctcgatgtcttcagcacccggggtcgcggtggggaagtccgcttccggctgggccggcttgaacggatccgttggctggctggccagcgccttcagcgccgcggcaacaccagcgccataggccgggtcggccttgctgcagttgtcgatgtggcgctgcttgatgaagtccggcgcatcgcccagggcacgggcggtgttggcgaacagtcgctccttctgtgcctggttgtagctgcggaacagcgcaccgggctggctgaagtagtcggcgtcatcctcacggaagttccagaagtcggcgtcgccccggatcttcatcggcggttcgcggtactgcggctgttcctgccactggccgtagctgttgggctcgtagtgcggcaggccgccgtagttgccgtccacgcgcatcgcaccgtcgcggtggttgctgtgcaccgggcagcgcgccgcgttcaccggaatctggtggtggttcacgcccaggcggtagcgctgcgcatcggagtaggcgaacaggcgcgcctgcagcatcttgtccggcgacgggccgatacccggcaccaggttgctcggcgcgaacgctgactgctccacgtcctggtaccagttgaccggattgcggttcagttcgaactggcccacttcgatcagcgggtagtcggtcttcggccacaccttggtcaggtcgaacggatggatgcggtaggtttccgcctccagttccggcatgacctggatgaacagtttccacttcgggaagtcgcccttctcgatcgcggcgaacaggtcgcggccgtggctttcgcggtcatggccgaccaggatctgcgcctgcgcgtcggtcagcgattcgatgccctgctggctgacgaagtggaacttcacccagaagcgctcgctgtcggcgttggtgaagctgtaggtgtgcgagccgaaaccgtgcatgtggcggaagctgcgcggaatgccgcggtcgctcatcaccacggtcacctgcagcagggcttcgggcagcagcgtccagaaatcccagttgttgcgtgcgctgcgcaggttggtatgcgggtcgcgcttgacggccttgttgaggtcggcgaacttgcgcgggtcgcgcaggaagaacaccggcgtgttgttgccgaccaggtcccaattgccttcttcggtgtagaacttcagggcgaagccgcggatgtcacgctcggcgtcggcggcgccacgctcgccggccaccgtggtgaagcgggcgaacatctcggtctgcttgccgaccttctcgaacagcttggcgcgggtgtacttgctgatgtcgtgagtgacggtgaaggtgccgaatgcgcccgagcccttggcgtgcatgcggcgctcgggaatgatctcgcggttgaggttggccagcttttccagcagccacacgtcttccatcagcagcgggccacgcgggccggcggtcttgctgttctggttgtccaccaccggtgcgccgaaggccgtggtcatcggcgtgaccggttcatcgccgtgcttctgcttcggggtagtgctcagctcgcgctgctgctgggcgccttccgcaggcgacggcgcggtgtgatacggacatttcgggctgttgttatcggactggctcatggctggctcctgcgggtgaagacgggatggaacatcttcactcgactttagctagggccagatgaaatgaataatcgaatgatccgttcagtttgatagtttctgtcaattgaaacgaagtataagatttgccggatctttcgataggcctcccgcgtggcggcgggaagccaggggtgcgtgctgcggttacagcagtgctttcagtcggtacagcgcttccagtgcctgcttcggcgtcagttcgtccggatcgatggcggccagtgcttcctgtgccttgttcgacggcgccgcgaacaggccgaactgctgcggtgcatccaatgcctgcggcgccagctcggcggcatggctctcaccgccgcgctgttccagctcggccagtcgacggcgcgcctgcgccacggtggcgcgcggcaggccggccagtgcggccacctgcaggccgaagctgcggttggccgggccgtccttaacggcgtgcatgaacaccagcgcttcaccgtgctcgacggcatccaggtgcacgttggcgatgccgctgcggccgccctcgtgctgctcgtcggccagcgcggtcagctcgaagtagtgggtggcgaacagcgtgtagcagcggttctggtaggccaggtggcgggccaccgcgtcggccagcgccaggccgtcgtaggtggacgtgccacggccgatctcgtccatcagcaccagcgaatgcgcggtggcgtggtgcaggatgtagctggtctcggccatctcgaccatgaaggtcgactgcccgcgggcgaggtcgtcaccggcgccgatgcgggtcaggatgcggtcgatcgggccgatcagcgcccggctggccggcacgaagctgccgatgtgggccagcagcacgatcagcgcgttctgccgcatgtaggtcgatttaccacccatgttcggaccggtgatgaccagcatgcggcggtccggatgcagatccagatcgttgggttcgaacggctgctcgcgcaccgcctcgaccaccggatggcggccacgctcgatcttcaggcacggtgccgtttcaagttccggccgcgaccagtccagcgcctgcgcgcgttcggcgaaggcggccagcacgtccagttcgctcagcgcggcggcgcactgcttcaacggttccagctgttcgccgagggtgtccagcagctgctcgtacaggtacttctcgcgcgacagcgaacggtcgcgcgcggacaacaccttgtcctcgaatgccttcagttcttcggtgatgtaacgctcggcattggtcagcgtctggcggcgggtgtagtgcaccggcgcgcgatcggactggcccttgctgatttcgatgtagtagccgtgcacgcggttgtagcccaccttcagggtgggaatgccgctgctctcgcgctcgcgcagttccaggtcaaccaggaactggtcggcatgggtggacaggcggcgcagctcgtccagctcttcatcgaagccatcggccagcacgccgccgtcgctcagcttcagtggcggcatttcggcgatggcgctggccagcagctgtgcgcacgcgtcgtgctcgcccaaggcggcatgcagtgcctgcaggcgcggtgaatccagcggcgccagcacttcgcgcaccgccggcagcaggcccaggccatcgcgcagggtggagaaatcacgcgggcgcgccgaacgcagtgcgacgcgggtcaggatgcgttccaggtcgccgaggcggcggaactgttcgcggatgtcggcatcgctgccgcgatcgatcagggtttccaccgcatggtggcgctgtaccagcacctcgcgcaggcgcagcgggcggtgcagccaccggcgcagcaggcgcccgcccatcggcgtcaccgtgctgtcgagcacccccagcagggtattgcgggtatcgccgtcgacgcgcgtatccagttccaggtggcggcgggtggcggcgttcatcgcgatcgcctcgccggcggtttccatcgcgatcgaggtcaggtgcggcaggcgctgcttctgggtttcctcgacataaccgagcagggcgccggcggcggcggtggcacgtggcttgtcatcgataccgaagccgctcagatcgtgcagcttgaagaagttcagcagctggcggcggccgctgtccgcgtcgaacagccacggcgcacggcggcgcacgccggtgcgttggcgcaggaagtcgggccagttctcctcgtcgggcaccagcagctcggccggctccagtcgggccagttcggcttccagcgcgtcgtcggtctcgacttcattgaccaggaagcggccaccggccaggtcggcccaggccaggccgtagccctgcttcgtgcgcgacagcgccatcagcagggtgtcgcggcgttcgtccagcagcgcttcgtcggtgacggtgccgggggtgacgatgcgcaccaccttgcgttcgaccaggcccttggccagcgccgggtcgccgatctgctcgcagatcgccaccgactcgcccagcgccaccaaccgcgccaggtagccttcataggcatgtaccggcacgccggccatcggaatcggcgcgccgccggagctgccacgctgggtcagggtgatgtcgagcaggcgcgcggccttgcgcgcatcgtcgtagaacagctcgtagaagtcgcccatgcggaagaacagcagcaggtccggatactcggacttggctgcgaagaactgcttcatcagcggggtgtgttcggcggacttttctttggacatggggctcgtgaatccggggcgtccgttcgcgccggagggcagcggcaacggagcgggtacagggccgtccatggtaactgctggggcacagggctgccgccaccggtggcaggcgggtaccgcacagcaacgaggtcaggccgggaccagggtgatctgccggtggctggcgaagatatccatcacgatctcgaagtaggttgggccctcgccctgttgcagggcgtccagctggcgcgcaatggtccgcgtgttgaaggtgcccggggcttccagcttggactgcagccactggcatgtgctagttcgtcccagtgcggcgcggctgtgctcgatatcactccagatcaccgtggcccgctcatggccggccaacacgccatggacgccatgcagcagatcatccagggcgtccaggcttggcccgagctgccagtcctcgccggccatgaacacgcggttgatctccgcgtacaggctggggatgtcgtgaatggtacagccttcgatctgcaggatgagcgacatgcgcccactgtagcggtgccggcggcactctgctgaccctcaataaagctatcagcaccgggagtggtccgggagcgcctgaccatggcatgggtctacgcatggaaatcgtactatgtgcggatcctgtgcggtggggtgttgggtgatctgtccacgttgtaagcaaggtgaagcacttgaggctcacgtcaagcagggggtcttcagatttttgtctgcgacgaatgtgaagccgtctggttttctttttgcccaaggtaacctgctggatagtcgagatgcccgggttggtgcatttgatttgaatttgaaagtgatgggggcggattttgagtgagccttcctgggtggttcgtggcaagacgaccagaggtttgattgatgagctcatgacctttgatgatctggacatgcacgtggagatctcggttgatgggggtgataccgttctacccataagcttggttgggcaggatgaaagggagtgcgtgctgttctatttcggcgctgacgcttgatgttgggctttgactcaatgtgtctttcaacgttcaggacggttttggcggcgcccggatgtccatcaggttcaggctgctcacatgcggaatgaagcgggttgccgagtctgtggctacatgtctgacatgccgccgtggggtgaggatggtagaacccccgattttgagctgtgcccttgctgtggggtgcagcacggctatcaggattgcaacagtgcctccagtctggaatacaggaggcaatggttggcagacggggctcgatgggctgagccaaagttacgcccggatcgatggagcgtggatgagcagctccgcaatgttctggatgaacatccgtgagtactggtgattgtgtctctgcaagatcgccggatggctccgcaatgtgagccggggcggttggacctgatcggctgtaaccggcaactgaagaggacagtcaatgagagacgcgtttgaaattgtcatggaggacgttccaggggggcgcgtacccacagtactggaggggatcggccacatggccgagtccgtttcgtggactgaactggagggcgagtcgatggcggctggcgagcggtctgcagaaagttccgatgaagtcgcgtgcagctcatgcgtgatctacacagtcaagggtctcagggtcggagcagtcctccgtattcctacgctgttgattcgtgtccttggctttgaaggaagggtaagcatcgatttttcattcgatatggattgggcggatgtcggtgcagcgatgtccgaactgcaacggcattttctgcagttgaaaatgctgagtggagcggaaacggtatacggaggcatggagcccgctcaggatatggatacccgattcttcacggatgccgagcgcggccctctgcgtgtcaccgatgcctgagtccggtgcgagaccctatgctggaagcgtgttcgctcgctcctcaaacaggtttgcgaccatccgtgaggagcgggaaagggcttcgcgacggctggtgccgatgaaggcactgtttttcgggggtgagtgacatggtcatgaatgcggtcttctctccatactgggacggcgacaggcatgtggtctcatgtgatgaacgggttgccgattcagaccccgtggcatacggtcaaggatccggtgccggggagatcgccgcttggttggaaggtgattttggctgtcttggaaggggcagtgagcagcgcacccgcggatcattcgatgccgtggcgtctgatgcaaaaggagggagctgcgtccaccatggcgaggggcatgtcgtccactgcgagcgagacctgtttctggtgttctccaggtggaacaggggtagcgttgctctgcgtcaccttcgagcagcagacggaagcgttcttttcgatggtgcagatgctgatggtggaaggctagctgaagcttgcttcacaaggcgtcttcgccgatgggcatgttaatgagtatttgggtacgcttcgctgcgcatggccggccgcaagagatcggcaggatctcgatgagcacggattctggttcttttcggatgcgccgtttggatgggtctggatctcacctgaaggcggcagctggagctgaaatgcctgatgccggtgcggcagtgtccgtggcatccccgtggcatcgagcattctgttgattgactcatcgaaatgcggttgccacagccggtttcgtgaattgcttgcgatatcaccagcccctcgtcattccgatatacccggaagacatcgcgattgctggtcccggcgcgtttcatgcctgtatgcacagttccatatatttggatcgatataataatctccgaccataaagtttccccgcgctgcgccgccatcgatcgtacggccatgatcaagggaattgagatgctcgccttacgcaacctccgagtgggatcccggctgggtgccgggtttggattgctgctgctgttcatcgtggccatcgttggcctggcgctgtacggaaatcacctgaagtccgcccagttcgagaaagtggtggacgtcaacatggtgaagatgcggctgttgaacgacatgctggataccaacaacgcggtgttgatgcaccgccgcctgatggtgatcaagcgcggcgaggattttgacagggattatcagaaggcgcaggagctgtcgcagacctacgacggtatctgggccaggtacatcaggattccgcgcgacgcgaccggcgataccctggtggcgaaaatcgacgcggcacgcaaggccaccgacgcctccacccggcatcttcacgagcgcatgaaggccggggatttcgacggcgcggccaaggaactgcttgccgagcaggggctggcaaccgcgtggaacgaagcgatctcgaccctgctgcggcatcaggagacgctgaccgagcgcagccgcgaggaataccgttcaaccgaatcctggaccggcacgctgtcgatcgtgttcggcgtgttgagcctggtactgggctcgctggccgcgtgggccatcacccgcagcctgacccgcccgctggaaggcgcggtgaagctggccgacggcatcgccaatgggcggctggacagcagcattgacgcctccggcaacgatgaggtcacgcagctgctcaggtcgatgcagcgcatgcaggcgcagttgcagtcggtgatggcggcgcagggcgagctggcccgccagcacgatgcgggcagcctcagctatcgcatggacgagagtgccttccctggtgactacgggcgcatggtgcacgagaccaacgcgctggtcggctcacacgtgcaggtacagaaccggctgatcgaagtgatgaagcattacgcccgtggcgacctgtcggtggacatggatccgctgccgggcgagaaggcggcgatcacccaggcaatggacgagaccaagaccagcctgtcggcgatcaacagcgagatccgccggctggcgacggccgctgcggcgggcgacttcagcctgcgcggcgatgaagatcgcttcgcctacgatttccgcgacatggtggccgggctcaatcgcttgatgcagaccaccgaccagaacctggtgcaggtgtcgagcctgctgcaggcgatctcgcgcggtgacctcaccgtacgcatgcagggcgacttccacggcgtgttcgcccgcatgcgcgatgactgcaatgccaccgtcgatcagctcaagcagatcgtcgggcgcatccaggccagcgcgtccagcatcaatctggcggcaggcgaaatcgcctcgggcaacaccgatctgtcgcggcgcaccgagcagcaggcggcgaacctggaagagacggcggcgtcgatggaggaactgacctccaccgtgaagcagaacgccgagcacgcccgccaggccaaccagctcgccatcggtgcgcacggtgtcgcctcgcagggcggcgaggtggtcggccaggtggtcaccacgatgtcggccatcgaggcctcgtcgaagaagatcgccgagatcatctcggtcatcgatggcattgccttccagaccaacatcctggcgttgaacgcggcggtggaagccgcgcgtgccggcgagcagggcaggggctttgcggtggtggccagtgaggtgcgcacgctggcacagcgctcggccggtgcggccaaggagatcaaggggctgatcgaggattcggttggcaaggtcgccgatggatcggcgctggtccgacaggcaggcaccacgatgggcgagatcgttgcttccgtgcagcgcgtgaccgacatcatggccgatatctctgctgcctcgcaggagcagagctcgggcatcgaacaggtgaaccaggcggtggtgcagatggacgagaccacgcagcagaatgcggcactggtggaagaggccagtgctgcggcgcgttccatggaggaacaggcgaacctgctggccgaggcggtttcggtgttccgcaccggcgcggtaacggcggctgcagccgtgcgtccggccctggctgcggtggccgcgaaggtcaccccggtgcgcagggcggcaacgctgtcgccgcacatcgagccgacactggcggccaatgccggggggtgggaagagttctagcagagggcaatgccggcagggagacggcgcccatcacgatggctgatcgtgatgggcgcggattttcttcctgaacgcgcgatggccgatgaggccgcggacacgcgcatttcacttccggttgccagccgcgggaggacacttgcgccataccggaacctaggagatggccatgaagacctcgacccgattgcttgtgctgggcaccctgctggcggcttcgtcggtggccggcgcgcagacctatggcccgcgtgatgaaggacgccgattcaacgatggcagccgcgtggtctgcaagaacgtggaagtgcagcgcaactcgcgcgatccgaaccgcatcgccggtacggccactggcgcggtgatcggcggcctgctgggcaaccaggtgggcggcggcaatggcaagaagctcgctaccgtggccggtgctgttgccggtggtgcggcgggccgccagatccagggcaacagccagcagaagaacggcgaccgtgtggtcgagcgccgctgcgaacgcgtctatcgctgatcgatcgccgacggcccccgtttttccccttccacatcgcagtactcgaacgccggcctcgcgccggcgttcttcattgcaggaaaaggggacggaggggattaagtcgtaatcccccaaccggccgcttacgacttaatcccctccgtccccttttttgcgaggaggcgccaggtggcgaggctgccgtagagcagcagcaggacggtgagagtgatcagttcgtggctgacttcggccaggctggcgtccatctggttcaggcgcaccatcaggttgatgccggaggtggtcggcagcagctgcgccagccagaccagcggttgtggcgtcatcaccgagggccacgacaggttggcgaggaagaacagcgggatcgaggtggcgatgatgtactggaaggcgcgttcgcgggtgcggaagaagctgccgacgaacaggccgaaggccaccgtcgccgcgatgaacagcgtgccacccagcagctggcccagcgggttgcctccgcgtggatagtcctgcacccaggcagtgaacccggcataccagaacagaccgaacaggccgatcaggccgaagcccagtgccatgccggccagggtcggcaggtcgaagcgcaggcgtcggccgagcgcgaggcggcggccgccgagcaggacgccgatgcccatcagcagcgtctggtgcacgatcagctcggccacgccgggaacgatggcgctgccatagccttcctgcgtgttgtacagggggcgctgcacaagcgtgaccggtggtgcctgcggtgcgcccatgaaggcggcctggccgaccacggcatcacgcccgaacgcacccagcgcgtcagccacgctgcccagcacccagctggcgcggcccaggtaggcaccgttgccaagcagtaccagcttggccgggtggccgcgcaggatgtcgcgctccagattggccgggatcacgacgatcccctcggcatggccggcttccagctgccggcgtgcgctgtcgacgtccgcgggttgaccgaccacgcgcgcaacgcgcagtgcgtcgagcttgcgcagcagctcgcggctggtcgcgctgtggtcttcgtccaccaccagcaccggcaggttgccggccacctggtgccggtaggcggctggatagaagaacgagtacaggatcaccgccccgaccatcaccacgatcgcgtagcggtcgcagagcactgccatcagggtctgccgcaggctgcgccagagtgcgctcatgcgtcggcccctgcgggctgtgcggcggcaggtgtgcgcgcaaaggcgatcaggcgcaggccgccgacgcctcctgccaccaccgccatcaacaacagcgtggccagcggccacaccgaaacctgcagcggcgaaccgatgaactgctgctgggtctgcagcttgatgtaggcgctgagtggcagcagttgatgccagatgcgggtgaacagagggccgtccagcaccgggaaggtggcgctggagaaggccaacgcggtgccgatgctgaggccgactgcggacagcgcggtacccatgtcgcgggtgacgccgacgaagaacaacgcgtaggcggccgtggccaggtagaacagtggctgtgcgagcagcagcaggagcacgctgccggccacgccgtcaccgcgcagccaggccaggtaaccgatgccgagcgcgccatacagcgagaacagcaggatgtatggcgcgaccttgccggcaatcgccggccatggcgtgcggcccaacgaggcgggcagggtgccgtcgcggatctcgcggccaaggctgccggccactgcaagtgccagtaccagcgacaataccgccgggaagatcaacggcagcaggaacagctcgtagctgcgtgccgggttgtagaggatgtccgactgcaccgcgatgggtgccgcgcgcagcttgcccgggccgacctgcaggccgatgcgctcgcgcagcaggcgcgcgttccaggccgagaccgcgtcgccgatatcgcgcgacgcggactggccggtggtcatgtaggtggcgttgtaataggcggacaccgtgccctggcgtccacgcaacgcctgccgggtgacatcgcgcggcaccagtacgatggcgaacacatccagccgacgcagctgcgaacgtgcgtcttccaggtccaccggctggctggcgacgcgcacgccgggactggcgtcgagcatgcgcagcagcaggcggctgtcactgctgtggtcgaggtcgaccaccgcgatcgggatatcgcgcatcaccgagggcgtgaacatccatgccatcaccgccagcatcagcagcggcagcagggtgaccagcatcaggtcggcgcggttgctgcgcagcgactgcagctcgcgccgccagctggcggcgaagccgccgcggccggggctcagtgctggggccatgcgaacagcacgctcatgccggggcggaagccctcgatgcggcgtaccgggcgcacccgcacctcgaagctgcggacgtcgtagccggacgactggcgggtggtacgccaggttgcatagtcaccggccggattgatgaagtagacctcgaattcgccgtccaggccgagcgccggcacgctgccctgcagcttgctgccgaccttcaggccctgcatctgcgattcgcgcaggttcatggcgacccacatgcggtcgatgtcgaccagggtgaacaccgggtagccggccggcaccagctcgcccgggtcggccatgcgcttgttgatttcgccggccaccggcgcgcgcccttccacttcgacaagcgcggcgttgacttcggccaccgcgccctgtgcctgttgcacctggccctgcgcggcacgcttgtcctgctcgcgcgcgccggccagggccatgtcgtactgcgcgcgcgcggcacgggccagctcacgcgaactggtggcctgggcatgcgcttcatcacgcttctgccgggtcatcaccccttcgttgaacaggttctgcacgcgctggtaagtggcttcagccagcgtcgcaccggcttcggcccgcttccagttcgcttcggcggcgcggatgtcttcgctgcgtgcgccttcgtcggccttgtcggccactgcctgtgcggcggccaaagcgccgtgcgcctgctgttccttggcggccacttcggggctgtcgagcaggaacagcacctgcccggcctgcacgcggtcgccctcgcgcaccttcagttcggccacgcgcgcggtgatcttggcggccacgttgatcgtgtccgcatcggccatgccctggatctggtcggccgggctgcgccaggccagccacaggccgagcaccaccacgaccagcagcaccactgccaggatcggtcccaaccggcgcttgcccgggggcgtcgtcgcatcgtcgtgcagcacatcactcatggtcgatcacctcgtccgcccgccgccggaactcttcgaaacggtccatctgtccactgatctccagcaactgtgccagcgcaatatcgtattggtaggcggcctgtgcgcgctcgacgcgggcgccgcccaggccgagccgcgcgtcgatcacatccagcgaagtggcctggccttcgcggaacgccagctcctgcaggcgcaggttttcctgcgcctgggcgatgctgctgtcgagcagcacgtactgctggcgtgcggtttccagctcgttccaggccttgcgcacacccagcgcgacctggttctcggcctcgcgcaggcctgcttcggcctggtcctgctgcgcacgcgcggcgctgatctgcgccggccgcgagttcggcgacaggaaggtgtacttcaggccgatgccgaatgcccagtccggatcggtcagcatctcgtcgcggcgacggaagtcgtactggccgaaggcgaagatctgtggtttcagcttggcctgctgcacgcgcacgccctgttcggcctgcgccaccatcgcccgcaggcgcgcgatctgcggctgccgcgcctgcgcggtgcgttcgaagctggccaccggttccagtggcacgcgctgcacgaacagcggcgacaccggctgcacctcgccgccactgcgcagcagcgtggccagtgcggccttcagcgtggccaggtcgttcaccgtcttctggtattcgcgctcggccttgtcgcgggccacggtggcctgcaggcgctgcgcgcgggtggcgaagccctcgcgttccagcttctctgcgtcggacaggtggcggttgaggccatcgcgcacatcgcggcgcacgtccaccgcctgctcggccaggcgctggccgaaataggcctgggccagctgcacggtcagcgattggcgttgtgcttcgcgctcggcgctggcctgttcgtgggcggcactggccgcacgttgcgcggccggaatcacgccgccggtgtacagcggcagtactgcagtcaccaccgggcgggtacgccagtcgcgttcggtgaacgacagcggcgagtcgatgccaaaggcctcggccaccggagccagcgaacccaggggcagggtgagcgtcttctggaactgcagccggcgcacttcgccggtgatctccggcaggcgcagcaggcgggtcgcgtcctgcaggtcctgcttgttgcgcacggcggcgtcggcagcggccaacgcatcggagacctgctccaggcgttgccgtgcctgttcccagtccaatgccggtgcgttgctggtgggctgcgcggcggcagcgaatggcaggcaggctgccagcgccagcgcggccttcgcgcggtgcatccttgtacgtcggccgatcacgcccatgcggtcccagtagtgaagaagtgcgcaaacggtagtgcgtgcagcgtgaagcccgggtctgcgatcatcggtttgtcctcaacgaagggtgcctctggccgcagtgcgcagcgcctgggtgatgtgctgcagcgtgcttgagcgcacggcggcatgctgccagtacagcggcacatcgagccagcggcggggttccagtaccaccacgcggccggcgcgcacggcgggcgcgaccagggtttccggagccatgccccagccgagtccgcacgcggcggcttcgacgaaaccggtggaggagggcaggtagtgtagcggcggctgcagccgcgcgcgggtcaggcgccgcacgaagcgccactgcagttcatctttgcggttgaacaccagcatcggtgcgtgcgccagggttgcggcctgcatgccatcgcggaagtactggcgggcgaagccgggcgaggcgatggcgtggtagcgcatcgcgccgagcgggtgcacgttgcatcccttcaccggttggctttcggcggtgaccgcgccgagcacgctgccatcgcgcagcagctgcagggtgtggtcctggtcgtccatgcgcaggtcgaacagatagccgtggcgctggtgcaggtcggcgatggccggcacgaaccaggtatcaagcgagtcatcgttgaccgccagggggatcggcgtgtgcgcagcgtcgctgccacgctcgggtagcagctcggccaatgcctcggcctccagcgcctgcatcggtcgcacccggcgcagcagcgcttcacccgcggcagtcggccggcagggtgcctggcgcaccaccagtacctgcccgagcctgtcatccagggccctgatccgctgcgacagtgctgacgggctgatcgacaggcggcgtgccgcagcctcgaagctgccttcctccagcaccgcggcaaacgcggccagttgcgggtgtaccaggtccatgccggtgcctcttcagttttcctgcacaggataaagaaaaatcagtttgtctaatcaaggcggttggcggcaccctgcgcgtcccctcgctgcctggcctgtcccgatgtggattgccgctaccgccgccggcctgttcgcaggtgccggcctgatcatcgccatcggcgcgcagaatgccttcgtgctgcgccagggcctgcagcagcgcaatgtggggacggtagtgctggcctgcgccggcgcggatatcgcgctgatccttgctggcgttggcggcatgggcgcgctggtgctgcagtggccgctgctgctgcaggtgctgcgcttcggtggtgcggccttcctgttctggtatggcctgcgggcggggctacgcgcgtggcgcggtggcagtgccctggccgccgccgaggcgcagggcggcagcggacggcaggtactgctgacctgcctggcgttcacgctgctcaacccgcacgtctatctggatacggtggtgctgctgggcagtctgtccacgcgctaccccggtgacctgcgctgggcgttcgccgccggtgcctgcgccgccagcgtggcctggttctgcacgctgggctatggcgcgcgcctgttgcagccggtgttccgcaggccgggcgcctggcgggtgctggatgccgccgtggcggtcttcatgtcctgcctcgccacgctgctgctgttgcgcccgctctaggccgcgtccaccgcgcactgcggggtttcgccggggcgcagggtcagcacgcgcacgccgctgcgggtgaccgccacggtgtgctcgaactgcgccgacagcttgccgtcgcgggtgtagaccggccattggtccggctgctgacggatggccggcttgccctggttgagcatcggctcgatggtgaacaccatgccttcttccagcaccatgccggtgttgggatggccgtaatgcaggatctgcggttcctcgtgcatctgctggccgatgccatggccgcagtattccttcaccacgctgtagccgtggctgcgcgcgtggcgggcgatggcgtggccgatatcgcccaggcgcgctcccgggcgcaccgcagcgatgcctttccacatcgcctggtaggtggcctgcaccagcctgcgcgcggcgtagtcgacctcaccgaccaggtaggtggtgctggagtcggcgatgtagccgttcttctccagggtgatgtcgaggttgacgatctggccgttgcgcagcacgtcggtggtgctgggaacgccgtggcagaccacgttgtcgatcgaggtgttgagcacatacgggaagccgtactggcccttgctggccggccgcgcctgcagctcatcgacgatcatgcgctcgacgaagtcgttgatctccatcgtgctgcgtccctgcagcggcagctggtcgagcgcggcgaatacctgcgccagcaggcgcccggattcggccagcaacgcgatttcgtgcggctgcttgatcatcgtcatgtcaggcccgcccgggcgccagcgcctgcggctgcaccccggctgcccgcagttcgctggcgacgatgtcctggaagctcagcgtggggttcatctcgcacagcatgccgacccggatccagaaggtggcctgggcgttgatcgaacggctggagacggtgcaggcacggcgcagctggtcgtgcagggtgtcatcgatgttgacgatgcccatgggcggtcctggcggaatggatatacgaagcatatatgttccgtatatccgcctcaagcccgcatcgttcagtccacgtgggtggcaaagcgcagtcggttgccgtccgggtcacgcaggagcatctcgcggctgccccatccggtgtcgtgcggtggctgctcgatcggtacgttggcggcactgaaggcgcggtgcagggcgtcgacgtcttcaacgatgaagtacaccgcgccgccgacctcgcagtcgccgctgtgttcggtgaggaagatcgtctggccgtcgcgggtgagctgggcgaacagcgggaagccgggttcgaagcggtgttcccagtcgaccacgaaacccagcccctgcacgtagaacggcagggtggtgtcggcatggcgcatgcgcagttgcgggatgacggtctggggcatcgcgaggctccggggcgggagtccagtgtagtgccggccgctggccggcatcccggcgagcctgggaacgatgaggttgccggccagcggccggcactaccgaagccacgtcggccagcggccggcacgaccggcgcggtcagcaggcggtcggcacggcggccatcgccgccagcagttcgcgattcacctgctggtgccgtgcctgccacaccggcagatcctcggcgctgacgtcaggttggccgtccagcgacgacagccagcgcttgaagcggctcttgtagttggccagcgacacttcgccggtgatgtcgctgccgaccaggccgccggcgcgcagcgcttcgatcaccaccagtgcgtgttccagctggaagcggccctggtcccagttgctgcgggcgacgtcctcggcgaacacatccttgtcgatcgacaggtaggtcgcttgcggcgacttggcctgctcggcggcgaacgcggcaaccagtgcctccgggtgctcgaaccgtcggaatgcacggccgctgccgaggcggtggccccagcccacgtccacatccatgcaccagtaagtcaggcgtccgcccatcagcgggcgccaatggttctcccaggcgtggcccaggccgatgtcactggaggtgatgccgagcacatggatgtgcgagatctgcggcagcttgctggccgcgttcacccacgacccgcagtgcatgccgaacgggaaacgcatgttgtccggatggttgtccagcaccaccagctggaacggctggtgcgcacgcatgcgacgcagcagcggcaggctgaggtggtggaagtcgccactgccgagcatcaccgtgccgagctgggccggcagcggtgccagcacttcagcggcgaaacggtccagggttgaagtgctgcaggcgaagcgcagcggatcgtgccactgcggcagcgccagggtctgcgcctgtggcagcggcagtacgccaccgtccaggtccaggatcagcggaaaacgcgacgacatcgttcaaccgcctccatcaggttcgccctgcaggtacggggccagcttgcgcagggcagcgcgcagcagcggggagcgggcgtggatcgcgtgccgggtggaggtgaagcgggcgcccagctcggccttgatccgcgagtcggtccagccggccacgtagtggctcaggccgtgcagcagcgcgtactcgaggttgtgcatccagctgaccgcatacaggttgtgctcgcgtgattgcgggtaggccaggccgatgtacttgtccaccagctttccggcgtggatgtagcacaggttccagccgatcaactggccctggtggcgatacaggaacatccgtccctggccctggctgtcggccagcaggtgttggaagtagggcaggtcgagctggtcgaaatgcaccgcgctctgcgcgaacacgcccaggtacagcgtgtacagttcggcctgcagttgcgggtcggcgagggccggatcgccggtggcgatgcagtcgatctgcaggccatcgcgcgagcgcagcttgcgccggatgttcttgcggcgcgaggacgacaggcgtccgagatagccatcgatcgaatcgaaatcgatcgccacccaggccagcggcatgccttccagttcgacgaagccgcgtgccagcagcgcctgcaggaaggcgctgctgtgtgcattggccgcgtcgtccagcagcggcgaatcgattgccaggtccttgaccaccagcagccgggtatcgccgatcgcgtgacgcgtcacgtcctcggccaatgcctctggtgcgacgtgcgcgggcaacggggtgtactcggtgctggtggcaccgacgaagcgggtcttccaggtaatccagggccgccacaggcgcgacagcggcaagccaagcagcttgccgcgcaggtcgtcgtccatcgtggtggtcaggtcgagcggcgcacggaaggtcggcaggccgctgggaagcaggcctgcctcgaatccaagcggcgggtgggccaggaagccctccagcagcgcggccggttccagcgcggtgctggatgcgcgtgacgtcatctccatcggcacgggaaccggcagcgcatcgacctcagcccttggccttggtcagcgcctggtcgagcagggtgatcgccaggtcgatctcttcgtagctgatgtccagcgacggcgcgaaggtgatcacgttcttgtaccagccacccacgtcgagcacgaggcccatgcgcttgccgtcgtgcaggaggtcaccggccaggccgatgtcgaccatgcggtccagcagttccttgttgggggtgtagccgtcggtctggcagatctcggcgcgcagggccaggcccaggccgtcgacgtcgccgatctccgggtgacgcttctgcaggccacgcaggccgtccaggaagtacgcgcccttctccggcacggtgcgctcgtaatccatttccttgcccagcttcagcacttccaggccgaggcgggtgcccagcggattggagttgaaggtggagtgggtggagcccggcgggaacacggtcgggttgatcagttcttcgcgcgcccacaggcccgacagcgggttcaggccgttggtcagcgccttgccgaacaccagcacgtccggggtaacgccgaagtgctcgattgaccacagcttgccggtgcgccagaaacccatctggatttcatcgacgaccatcaggatgccgtacttgtccagcacgcgcttgaggccagtgaagaagttgcgcggcgggatgacgtagccaccggtgccctggatcggctcgacgtagaacgcggcgtactcggcctggccgaccttgggatcccacacgccgttgtattcgctttcgaacaggcgctcgaactgccacacgcagtggtcggaatactcgtccggggtcatgcccttcgggcgacggaacgggtacgggaacgggatgaacatcgcgcgctcgccgaagtggccgtagcggcggcggtagcggtagctggaggtgatcgacgaggcacccagggtgcggccgtggtagccgccttcgaaggcgaacatcaggctcttgccgccgcgcgcgttgcgcacgatcttcagcgaatcttcaatggcctgcgcgccgccgacgttgaagtgcacgcggccgtccaggccgaacttctggtgcatgtccacggcaatggtcttggccagctgcacgcgggtcgggtgcaggtactggctggcgacctgcggcagggtgtcgatctggtccttcagcgcgtcgttcaggcgcttgttgctgtagccgaagttgcaggccgagtaccacatctgcaggtcgaggtagggcacgcccgcaccgtcgaacatgtagcttccttcgccgcgctggaagatcttcggcgggtcgacgtagtggacggtgtcgccgaaggagctgtagcgggcttcgtcggccagcagctgcgcgtcggaggcagccgcgtcggcgttcttgtcaaaaatgttcatgcagttcggttccgtgaaggacgttcgaaaggggtgacgggggagcgcgcctggaagggagtgctcaggcggtggccagcagcaggggcagtgcggcgggctgcgggctggcgtcgaggcgacgtggctgcagcaggctgccatcgagcaagcgcggcagcagtgcgattgcatcgtggaaggtatcgatggcggcatgctcgatgccggccttcgtgcaatgggtgatcaggcggcgcttggcgaacacgaagtcggcatcttcggagacgcagaaatccgagctgccatcgccgatcatcagcacgcgtggtgcttcgtcggcacgcgcctgcgcggcgcaggtgcacttgcaggtaccactgcggcatccttcggcctggtagggcgactccagttcccaatggtcttcgcaccagcgcaggtggttggccaccaccggcagtcgcgacaggccgtggttggcgaggatgcggtggatcgcatagtccagcccgtcgctgacgatgcgcagcggcacgcccagctgttcggcgcggctgacaaaggcggcgaagcccggatcgatctgcacctggtccaggtgcgcgtcgagcgtggccgggtccagcttcaacagccgcacctggccctgcatgcattcacgcgagccgatctttcccgccttccactggtcttccagttgctgccagcccggctggccgtacttctccagcagcgagtcgatgacatcttcgaggctgatggtgccatcgaagtcacacaggatgctccagtgcatgggcaggtccgtcgatgaaagaaacgtccggcacgatgccggggcaggctcaatgtaggcaggcagcctttctcgttcctttcctgttgaaagcctgcaccgccgggtggggaaagtgttcaggaatcgagcgtgctgaatgggcgtgatgccgtgaaaaccgcgctttcagggctgcgcagcggccagcgcccgcaggatctgcgcggtctcttcccgggtctgccaggcgctgttgccgagggtcagcatgcgtgcggcgaagtcgcgcgcgttcggcatgtcgtcctgcggcacgatgccacgcaggtaggcgtagtcgggcagggcatggatgaacatgcggctggcaccgagaccgcgcggccacagttcgtccagtgcggcatcgcgcgcgcgctggctgggcagcagcagcatcagcatcggccaggtgccgccggtgccggccaggccatcgaccacctccaccgccggcagctgtgccagctgcacacgcagctgcagtgcgcgcaggcgcccggcctgcaggaacgcaggcagccgccgtgcagcgtgggcgcccacgttctgccgccactggctgacccggtgctgggggatgtccagcgggaaaatgtctccgaccgcgtcttccagatcgccgcgttgcagggcgctgcgcagcggattgccgtacaccagcgacagcagcgaggggcggtaacaggcggcaagacccagcagctgcacgctgcgaagcagctcccagcgcaggctgaaacgtacctgttcggcggcatgttcggccagcgcggcgcgcagctcgtcatcgcggctgaccagcaggccgccttcatgcaggctcagccccttgccggcggccaggctgaagaatccgatgtcgccacgcaggcccacgctgctgttgccgacccgtgcgcccagcgcctgcgcggcatcttcgatcacccaggcaccggcgccgcgtgcgacctcgcaggcccgttcgacatcggcgatgcgcccgccgaggtgggtgggcaggattgccagcgtccgtgcgtcggccaggcgcgagagctgcgccggatcaaagtcgaaatggccacgccgggtatcgcacagctgcacgcgcaggccgaggctgtgtaccgcgatcggcaccagcggacaggtataggccggcaggatcacggtatcgcgcttgggcgcgcgcttgcgcagggtgcgcagcgcgatcagcagcgcgtgggtgccggaacaggtcagctgcagcggcggtgtgccgagctgggtggccaggatgtcgcgcaggtcgccgccgccgggaaggaagtcgctggcctgcatcggcaggccagcggtcggcggcagttcgcgcgcgaacaggctcatcgcagcccgctcacgaggtgctgtcggcggggctgtgcgggtcgtccgcttcggcgcggccgaggcagacgatgccagccacgatcagtaccgcaccgacaaggtgatgcagggtgagcggctctttcagcagccaggccgacagcagcagcacactgatcacctccaggtgcgaggccgcgaacgccggaccgatcggcgcatggcgcagcaggctcatccaggtgaagaacgcgccgatgtagccgaggaccgcgccgtatacccacggctgcgacagcacgcgcaacagccacgcggtgttggcctcgaccggcatcgcggcgtcaccggcgtacttgaagcacagctgggccagcgtgtcgaaggccatcagcaggggaaagccgatcacatacaggcgcctcatgagccggcccccaccaccgccacgcccgccgtgaccagcagcatgccggtcacccgcaatggcgtgagcttttcgcggaacaggatgcggccggcgatcatcagcgcgacgatgttgatcgagcccagcagcacgcccttggacaacggcaccagcgacaggaacgcgatccaggcaacgaactcaagcacgtagcaggcgatgccgatccacagccaggggcggctgagcatgtgtttccagcgttgcagtccttcgccatcctgcgggtcgctggcggcggccttgaaggcgagctggccaccggtatcgagcaccacattggccagccacagcagcgtggcgagtgcccccatctcaggccaccgccttgagcacgccgctgcgttcaccgatttcggtgaagaaacgcgcgctgcggcggatcacctcgcggcgttcgcggtcgatcgtgatcatgtggtagctgtcttccagcaccaccagttccttcgggccgctgaccctcgacatcaccagttcggcgttgcccatgctggccacgtcgtcttcgcgggcgtgcatcaccaggcacggtgcggtgacctggtgcaggtggcggcgggtccagttgctcagggcgcgcatctcggccagcgcatgccaggggttgcccggcaggccggccgcggcgctgtcgccggacagcatggcggcactgacctgcgcacgcaggcgctcgtcacgcaggccgtagggcggttcttccatgaacatgcggtcgcggccgatgttgaagcgcttgaaccagggcagcaggaacgacaggcgggccacggcgggaatgttccagccatcgtagcggaaggtggcgccatacacgccgacgccggacacccattcggggcggcgtgcagccagcgccagcgccagtaccgcgcccatcgacaggccgccgacgaacaactggtcgaccttgccacgcaggctcgccgctgcatcttccacgccctggtaccactgttcccaggtggtcgccagcaggtcatccacggtgccgcaatggccgggcaactgcacgccgtgtacggtgaagccggcgttgttcaggcccttgcccagcatgcgcatttccgccggggtgccggtcaggccgtggaccagcagcacgccctgcgggccaccgggaaggaagaagtcgtgcgattcggtcacctggcggctccgggacggcagtggggatggtcaggatcgcaagcgcgattttcgccagcctttcagcgccccggtacgggtcagggggccttcagcagcggcagtgtgatggcgaccttcaggcccccaccggcgcggttgaggaaggtcaggcggccgccggaatgctccaccgcttcgtgcgcgatggccaggcccaggccggtgccgctggctgcggtgccaggcgctcggaagaagcgctcgcccagccgtggcatcacgtcctcgggcacgccggggccgttgtcctccacgtacagttcgacgtcattgtcatccagcgcatgcacgccgaccgtgacggtcgcatcgcggccggcatagcgcagcgcgttgtcgatcaggttgtccagtgcttcgtgcagctgggcaccattgccgagcacgcgcagcgggtgggggctgccgcggtagcccagatcgatgccatcgcggatcgcttcgggcacgcgcatgccgacccactgcggcaccagctcgcacaggtccagtgcctccacggtatcgggcacggtctgcgcccggctcagtgcgagcagctgggtgctgacccgggcggtgcgctggttgagccggcggatgtgctgcaatgcctcgcgcaccgtgtccgggtcaccatgggccagcgcctggtccacatgcagggccatgccggccagcggcgaacgcagctggtgcgcggcatcggcgatgaagcggttctgcagcgtgatcatttccgcctggcgggcaaacagatcgtcgatggtgctgatcagtggctggatctcctccggcacgtcggcgtcggagatcggtgccagttcgccacggcgctgcgccaggcgggtcctcagcggtgtgaggatgcgcaggccgtaggtcacgccgaaccagaccagcgctgcggtgcccagcgccagcatggtcatcagcgggatgatgatcatcaggatctcgcgcgcacgctggcggcggtcggccatgctttcggccacggtcaccgccagctcgtcctgcggatcgttcatcgcctgcgtgcagacggtggccatgcgcacctgctggccattgaggttgccgtcgtacagggccggatgcacgccggtgcagtcctgagaaggggcatacgggctgaaatccgcattgccgctgagggtgcccttgcggctgctgtcgacgttgaaatagcgatggccgtcggggtcgtactcgatcaggaagcgcgcctgcggagacaggtcgctggtcaccggcatggtgctcagcatctgcgcgaacgagtgcgtgtcgtcgatcaggttacggtcgtggatgcggttggaataatccaacgcaacgtaataggccaggatcgtattgaaggtaagcaggcccagcatcggcaacgccaggaaggcgagcaggcgccggcgcaggctgggggggccactgatcacggggcgctgtcgtcctgcgcgtcttccagcatgtagcccagtccgcgcacggtgcggatgcccatgccgccgggctgcagcttgcggcgcaggcggtgcagggcgatgtccaggccgttgtcggtcaggtcctggccccagtcgcacagcgcctccaccagctgtgcgcgcgagacgatgcgctcggcgcgtaccgccagtgccgacagcaggccgaactcgcgtgcggtcagttccagcgactggtcgtcgatccacacccgatgcccggccagatcgatgcgcaggcggccgatgcgcaggtccgggttgccattgctggtcacgcggcgcagctgtgcgcgcacgcgggcttcgaattcgtccagtgcgaatggcttgaccaggtagtcgtcggcaccgaggtcgagcacgcgcacgcgttcggccaggccgtcgcgggcggtcaccaccagtaccgccaggccatcgccgcgctggcgcaggcgctgcagcacgtcgcggccatccagctgcggcaggcccaggtccagcaccagcagcgcgtattgggtcgaacccagcgcggcgtcggcgtgcgcgccgttgtcgacgtggtcgaccacatgcccctgccggcgcagcgaggcgcacaggccggaggcgatgtccgggtcgtcttcagcaatcagaacgcgcatgcgcgggaggctcctgtaacggtcgggcccagcggatggacagggtgggcctctcggctgccgagggtagccgcaaacggggtgaaggtggagcgcgccggcacctcccggcgccgtcgcgctgtcccgccattcagtcctgcaggcccggctcacccagtaccagcggcacccgtgagccgtccagcaggccgcggctgagcctgccatcctcgatgaacagcagttcgccgttctcgccgttcttgatgctgctgtcgatggcgatcacgcggtcgccgtggaagctgctgacgtgtggcatcgaggtatggccaaccacgatgcgcgtgagctgcaggcggtcgagcacggcctgtaccgccgcggtgtcgaggcggccatcgaaatagccgcggtaccagatcgggctggtcttgccgtcatacagcggtgcggtggccgggtcggccttcacttcggccttgggcaggcccagagaggcctggtaggccgcattggtgcgtaccgggtccagcgccagctgcaacgcctcgtgcgagatgccgccatgcaggaacagggtatcgccgatcttcagcagcaccgggcgggtgcgcagccactgcccgatcaccgagtcggcgccatacagttgcgggtagctgcggcccagcagctgggcgctgcgcaggtacttcgggttgacgtagcgcaggtcgtcgtacagcaccatggtttcgtggttgccgagcacgaagtgcactgcgccaccggcggcggcggcctgctgctgcaggccgtacagcagccagaacgcctcggtcacctgcgggccgcggtcgaatacatcgccagcgatgaccagcgtgtccttgcccagggcccagcgatcctgggcgtcgatgacctggtgggcgcgcagcaggcgcaccagcagcccgtactggccatggatgtccgacagcgcgacgatgcgcggcgcggccggcagcacggagaccgaggccgcattcggcgcggccacgtgcacggtgtgttcgtagccacagcgcggcgcgatatcggtgcccgtcgtgttgatggccagcgagcgcgactcgaccttgtcgtcgcagatccacttggcctgcagctggtcgccctggcggaatacataggggccatcggcctgcacgtggtcggcgggcgcggcaacctcgcgggcctgcgtggttgctgtggcgcaggccagcagcggcaacagcagggcggtcagcaggaaagggcgatagcgcggcatcggcggcgtccggcggcggaaacctccgatgctaaccggcgcggcccgatcgtggtgtgcgcgaatgggcggatcaggcgccgcgccggtcgtccttgagcttgcgcacgcgggtggcggcggcctgcagcggctgaccgtcgcgcccgtgtggctgcatgtagggcagtggtcgccgcgtgctggattcgatcaactgcgaatgggcttcaccggcgctgaagcgatggcgttctccccactggcgcagcgcgaccagcagcgggaacagttcctggccggcgtgggtgagcacgtattcctggtaggccgagccatcggaggccggttgcagttgcaggatgccggcctcgaccagcctgcgcaggcgatcgctgaggatgttgcgcgccgcgccgaggctgcgctggaagtcgccaaagcgcgtgacgccgtcgaaggcatcgcggatcaccagcagtgcccagcgatcaccgagcaggtcggcgctgcgggcaacggggcagggactgttggcgtgcatgctgtgacctccgaatgtggttgcagtttaaaaccaatgacgatagcctgcatcaagtttcaaattgcaactacatcatgagcgcatcgatgtcccgcccattgctgaccctgctcgcggtcgcggccggcgccagcgttgccaacgtctattacgcgcaaccgctgctggatcggctggcacaggccttcgcactggaccgtgccgtggcgggcgcagtgttggcggcaacccaggccggcagtgtgctggcattgctgggcctgctgccgctcgccgatcgcggtgaccggcgacgcctgctgcggatgcagttgatcgcgctggtgctggccctgctgtggctggcagcggcacgcacggccggttggctgttgtcgggcatgctgctggccgggctgttgggcaccgcgctgacccagggcttgatcgcctataccgccacgcttgcgccgcccgagcagcgcgggcgcctggtgggcgtggtgcagggcggcgtgttcatcggcctgttgctggcgcgcgttgtatcgggcgcggtcgcggccaccgtcggctggcgggcggtctatctgctgtcggcagcgctgatggcggccctggccgtgctgctgtggcggcgcctgccggcggtaccaccgcgctggcgcgaactgctgggttcgatgctgggcatgctgcgccgggaccgcgcgctgcgcgagcgtgggccgctggcattgctgctgtttgctggcctcaacgtgttctgggcggcggtgccgctgccgctgtcggcgccgccgttgcagtggtccaccgcggccatcggcgcactgggcctggccggcgtagtgggcgccttgatggcggcgcgggtcgggcactggatggaccgtggtttctccggtcgggtcagtctcggcgcgctgctgctgatgctggccgcgtggtggccgctgctgggcctgccgcagtcgctgtcgttgctgctgctgggcgtgatcgtgctcgacctcggtgggcaggcactgcacgtatcgaaccaggcgctgctgctgcgtgcaccggcagaacagcatggacgcctggtggcgttgtacatgctgttctatgcagtgggcagtggtgccggtgcggctgccgggccctggatgcaggcccggcatggctggcctgccgtgtgcctgctgggtgcaggcatcgcggcgctggcgctgctgtggtgggcagcatggcgggtggtggcgtccaatgcatcggctggcgggcgaatcggtagagtcgactgtcggtagagtcgactgtcagtcgactgctcttcgccccgcgtgcgaaaaatcccgcgctgcgcgcgatagtcgaccagcggtcgactctacctgtcctgtcgtcatcgctgcagtgcacgccgtcccggtgcttcctcaaggtccgcgctggccactaccacgcggttgcggccgctgcgcttggcctcgtacatcgccgcatcggcccgtgccatcagccgctcgtagtccgggtggccgtcatggccggctacgccgatgctggcggtcagtgccagtacctggccgttggccaatgccaccggtgactgcgcgatctgccgccgcaggctttcggcgatcaccgcggcctgtgattcgctggccgcgaccagcaccaccacgaactcctcgccgccatagcggaacaggtagtcactgccgcgggtcagctggccgagcaggccggcgacgtgctgcagcgcgcggtccccggcgtcgtggccgtggccgtcgttgatcgccttgaagtgatccaggtcgagcagcagcagcgagaacggcgtgcggttgcgcgtggccagctcgatctcccggcgcagcacggtaggcaggaagcggcggttgagcaggttggtcagcgcatcgctgccggcatccagctcgccgatgcgctcgaacagcagcgtcatcagggtgcggatggcggccaggtcctcgcggatggccggcagcaccgccagtcgttgtgccggggcatcgttgctcgcccgctgcaggttgctgtcgatgcgggccatcagctggccgacctgccgggtctcgctgctctcgccgaagctggggatgcccttgtgggtgaaccacaggccgaactcggaagtggccaggctggcgctgtcgctggcctgtacgtggccagcgagcgcgtagagcagggcgttctcccagtccagcagcagtgcgcgctggcgttcgcgttcggtgccgacgttctgcaccagcgagaacagccggtacgcagcatcggcgcgggtcgagcgctcgcgtgcatgggtataggccagggtcatgccttccatggcgatgtccatgatcgcgctgaggcagtcgatggcggcgaacgcagtggcactgtcgggcgcgtcgtcgtgcaggcgcacgaacagttcgtgcttgagcacgcgcgcgccgcgggtgaccaggtcgaccggaataccgacccgggcatgcacatcgccgatcacccgctgcgaggcaacggcgccggcaataccgtcggcattggtggtcagcaactgcaccagccagcgctgcatggccggctgcaggcgctgcttgacctgatcgtgggacaggaagcggcgtgcacgcccgtcctgcagcagtacctcgtagaagcgttgggccagcgccggcggggcatcggcggcggcggcgtgcagcagcgcggtggcggcagggctggcctgttgcaggcagtgctgccaggcctcggccagcggttggctggcatcgtccagttggggtggttccacgtcgatctctgactgcgtacggcaaaccacgggtatcggccgcggtggcgcacggttgatggcgggttggccggccagtttaagcgcgatgcagggttgcacggcgcgcaaagcacgtcggcgccgcggcggcaatgagtaaacgcatttgagaatcactcgcattgatgggagaatgcgcgcacggatcgggccgcaggcgactgcagcgacgctccgcctccccctcgtcgttgcctcaagccctttgccagaggccccgttgccctgccagaaggtccagatcatgtctcctgccgttgtcctttcgccgcgcccgctggcgctcgccgttgccgccctgctggcgggaagcgccctgaccgcccgggctgaaaccgacgccaccgatatcgacacggtgcatgtcaccgcctcgcagattgcccgccaggcactgggtacctcgaccatcaccgccgaggacatcgccaagcgcccgccggccaacgacatcgccgaactgctgcgcaccatgccgggcgtcaacctcaccggcaacagcgcctcgggccagtacggcaacaaccgccagatcgacctgcgtggcatgggcccggaaaacaccctgatcctggtcgacggcaagcgcatcggtgcgcgtgatgccgtgcgcatgggccgtagcggtgagcgcaatacccgcggtgataccaactgggtgccggcggaaatgatcgagcgcatcgaagtgctgcgcggccctgcggcggcacgctatggctccggtgcgtccggtggcgtggtcaacatcatcaccaagcgcccgaccggcgacctgaccggagcggtcgacctgtatggcctggtgcccgagcacagcgccgaaggcggcagcgagcgcgtcggcctgcagctgagcgggccgatgaccgacaccctgtcgttccgcctgtacggcaacctcaacaagaccgacgccgactcactggacctcaaccgccagtacgccaccaacccgaacgcggtgccgccggctggccgcgagggtgtcaagaaccgcgacgtcaacgcgttgctgcgctgggacatcaccgccgaccaggtggtggagttcgaagccggcaccagccgccagggcaacatctacgccggtgaccgcgcggtcagcactaccggtacctcgaccggcgttgacttggcagcgctggccgacggcgaagcggaaaccaaccgcatgtaccgcaacaccggcgcgatcacccatcgcggccgctggggcgacgtgacctcgcgggtgaccgccgcggtggaagcggtcaacaactcgcgcatcaatgaaggcctggccggtggcccggaaggcagcttcaacggcaccgactggtcgacctcgcgcctgcgcaactaccagctggatggcgaagtgagcttcccgacctcgctgggcagcgtcgagaacatctggacgctgggctttgaatacctggacagccgcctgaccgacccgtactcgatgagccagtccagcagcagcggcggcggcatcccggggctgtcggccgatcgcgcgcggggcaaggccgacgcgcagaccaccgcagtgttcgtcgaagacaacatctacctgggtgagcgctggatcgtcaccccgggcctgcgcttcgaccaccacagccagttcggcaacaacaccagccccagcctcaatgcgcagttccgcatcaacagcgactgggtggtgaagggcggcatcgcccgcgcgttcaaggcgccgaacctgtaccagtccaatccggactatctgtactacacccgtggcaacggctgcccgaatgcactgccgagcctgggtgccggttgctacatgcgcggcaacgcggacctgaaggcggaaaccagcctgaacaaggaactgggcatcgagtgggcaccgcagagcggctggcaggcctcgttgacctacttccacaacgactacaaggacaagatccaggccggctacacccaggttggcctgaccgccgacaccaagggccgcatcttccgctgggagaacgcgcccaaggcgatcgtgcaggggcttgaaggcaacctggtgatcccgctgctgggcgagcagggcaaccgcctgaaatggagcaacaacttcacctacatggtggaaaacgagaacaagagcaccggccagccgctgtcggtgatcccgaagtacaccgtcaacacgatgctggactggcaggccaccgacaagctgtcggtgctgctgaccggcacgttctacggcaagcaggaaccggccaccgccaacatcaacaatgatccgcgctgcaccggcagctgcgatccctcgatcgcgctgcaggaccgcggtgcctacaacatctggggcgtgagcgcgcgctacaaggtgaccgagacggtcagcttcggcttcggcgtgaacaacctggccgacaagcgcctgttccgcgaggccaacagcagcgatgccggtgcggcgacctacaacgaaccgggccgcgcctactgggccagcctgcgcttcgggttctgaccgcacgcggacgccggtccgctgcggtcgccaggccaggcctggcgctgccggccacgctccggtagcgccgggccttgcccggcgacaccggcgccgcgcgcctgcaatgttataaacaccgtaatagtctcccccgccagcacggcgtagcctgcaccgcatcgcaaaggagctgttgccatgggccacgaccacgatcacctgccatcccagatccgccacgagaaacccttgtggtgggcgctcggcctgacctctaccttcctcgtcatcgaggtggtgggcgcgttctggaccaacagcctggcgctgctgtccgacgcggcacacatggccaccgatgcactggcactgatgatcgcgctggtcgcggtgcggttgagccggcgcccgccggacgcgcgccgcacctacggctatgcacgcctggaagcgctgggcgcgatgatcaacggcgccatgctgttcgtggtcgccgcctacatcctgtgggaggcgatcggtcgtttccgcgaaccgcaggagatcgcatcttcgggcatgctggtgatcgccgccgcaggcctggtcatcaacctgatctcgatgcgcctgctgcaggccggcagcggcgagagcctgaacgtgaagggcgcctacctggaagtgtgggcggacatgcttggctcggtggcggtgatcgccggtgcgttgttgatcaagtggaccggctggaagccgatcgacccgatcctggcggtgctgatcggcctgtgggtactgccgcgcacctacgtgctgatgcgcgaggcgatcaacgtgctgctggaaggcgtgcccaagggcatgaacgtggccaaggtgcgcgacagcctgtccggtcatgctgcggtgctggacgtgcatgacctgcatgtgtgggcgctggcctccagcacgccggcgctgaccgcgcacatcgtgatgcgcgacggcaccgacgccgatgcgctgcgccgtgagctgggcgggcgcctgcacgatgacttcggcatcgaacacgtgacgctgcagatcgaagcggaccactgtggtgaagcctgcgctggaccggcgtcggcaaagggcggcgcgcagcagggccatgaaggccacgaccacggtgaggacgcgcagggccatcgcggccacgtgcatcattgaatgaaaatgaaagccgcaccggggaatgcccggtgcggtcattcgtcgcgtcgcgaggccagccgatccgccagccgggtcggttccggcagccggtaaccgcgcagcgtgcgctgcacccagtccagcgcggtatcggcactgacccgatggccgccggccacgaacagcggcttgcagcgcaccttgctgcgcagcacccagcccagttgttcgtcgccatcctgcagcggcgcatgtgcaccggcctcggcgcccggttcgacgaaccggcccaccagcttcgacttggccacgccgatgctgggcaggtcggtgaccacgcccagatgcgcggccacgcccagccggcgcggatggctgatgccatggccatcgacgaacaccaggtccggcgtgcgcggcagcagcgccagcgcggccagcagtgccggcagctcgcggaagctgagcaggccggggatgtagggcatcaccgtggggatgcgcgcgatctcctgcgccacgggcttcagcgtctccacgtccagcagtaccgccgcggcgcgggtgatggcgccgtcgtcttcaaagccaacatccagcccggccagccaacggacgtcgcgtggcaggcggtcctggcgctccacgcggccggccagctggagctgctgcgcgcgtgccgcggagacgctgccttcccaacatccgggatcgatcaccgtattcatcggtcacagcatcgcacgggcggcgccacggcccggtgagcggcggccgggctacaatggcggcctgcctttcctcgcgttggagaccctgcagtgacccgtaaactcgtactgttgcgccatggccagagccagtggaacctggacaaccgcttcaccggctgggtcgatgtcgacctgaccgagcaggggcgccgggaagcggccgccgccggtcgcctgatgcgcgaggaaggcctgcagttcgacgtcgcccacacctccgtgctcaagcgtgccatccacaccctgcagggtgcgctggccgagctggagcaggactggctgccggtgaacaagtcctggcgcctcaacgagcggcactacggcggcctgcaggggctggacaaggccgagaccgcggccaagcacggcgaagagcaggtcaaggtctggcgtcgttcgtacgacatcccgccgccgccgatggacctggaagatccgggccacccgatccatgaccgccgctacgccggtctggaccgcaacgcgctgccgggcaccgagtcgctggccaccaccctggaccgcgtgctgccgtactggcacgacgccatcgcgccgcagctgaaggacggcaagaccgtgctggtcactgcccacggcaactcgctgcgcgcgctgtacaagtacctcaacaatgtctcgcgcgaggagatcctcgagctgaacatcccgaccggcatccctctgctgttcgaactgaacgacgacctgaccgtgcagtcgttccgctacctgggcgacccggaagcagcgcgcaaggccgccgaagccgtggccaaccagggcaaggcgaagtaagaagcacaaggccggcgcaagccggccttcgcttttgtcgagccgagcccacgctcggccggcgctgtcgcaacccggtagagccaacccatgggggctgcatcagccagctacgagggatccatgcggcgcaccttcggcggctgcaacgcggcaatgtcgatgacgtgttcctggcatatcacctgatagtgcgtgaatgggcccgggtaactgacatcggcaaaggtggcatggtccagataatcgaggaacttcgaacggctgtagcggcggaacaggttgccgctccaggtttcggcgtcgtcccagcgctggtaggactcgttgtgcacggcgtagctgatgtagtggtcccagatcagctcaaaacgctgcgagtggggcatcacctctatcgcacgcgcatcatcgattgaacgtccatgagcgagctccacacgggagggctttccgaccaccaggccttcctcgacgaccaggcgcagacgattcgcttccggctcgccgatgcccgccaggaacagacactcacaagcgtcgatggcctgcagcagcgcagcttcgtccatggtcatgaagtccagtgatcgcggaagccagagcatagcggcatgcagacggagccgcgccatgcgctcgtgacctttggccggtccccagcgtcgctcccgcggctaccctgtgaaattacccgcaggagagcctcatgaacgtccgcaacctggtcccgctgggcctgaccatcgccatcgctgcctcactggcggcctgtggcaagaacgaaaccgccccggcggccagtgccgacgccaagccggccttcgacctgtcgcagatcaagacgccgctgatctcgctcaacagcgccgacctcgatccggccattccggcctgtaccgacctcaatggtttcgtcaacagcaagtggctgaaggccaacccggtgccgggcgaccagaccacctggggcagcttcgagatcctgcgcgagcgctcgctggaagtgcagcacgcgctggtgcagcaggcggccgccagccaggccaaggcgggctcggtggaagcgaagatcggtgacatctggaagaccggcaacgatgaagcgaagatcgaagctgccggcctggcgccgctgcagccgcagctggacaagatcaccgcgctgaacgacaccgccgccatcacccggtacctgcgcgacagccaggccgagggcaagggcgtgctgttctcgctgttcgccaatgccgactacaaggattcggccaacgtcatcgcctacgtcggccagggtggcctgggcctgccggagaagggctactacttcgacgatgcgcaggccaagatccgcgacgcctacgtggcctacatcgcacaggtgctgaccctgtccggcctggacgcggcgcaggccgccgagcaggccaaggccgtgatggccttcgaaacccgcctggccaaggcctcgatgtcgcgcatcgaaatgcgtgacccggccaagcgctacaacccgctcagcgcggctgaggccgacaagctgaccccgaacttcagctggaccgcgctgttcgagaccctcaaggtgccggccgcgcagaagttctcgctggcccagccgggcttcttcgctgaaatggacaagatgctggccgatgtgccggccagcacctggcaggcctacctgcgcttccacaccatcgacgacgcctcgccgtacctgagcagccagttcgagaaggccaacttcgatttctacggcaccaccctgcgtggccagaaggaaatgcagccgcgctggaagcgcgtgctggagtcggtcaacggcggcatgggtgaagcgctgggccagctgtacgtggatgccgtgttcccggccgagtcgaaggtcgccatgcagcacctggtggagaacctgtcgcaggcgctgaaggcgcgcctggagcagctgccgtggatgggcgaagaaaccaggaagaaggccctggagaagtgggccagcttcaccccgaagatcggttaccccgacaagtggcgtgactgggcgggcctgcagaccaacggcgacagctacctgggcaacatgcaggcggcgcgtgcgttcaactaccgctacatgctggacaagatcggcaagccggtggacaagaccgagtggggcatgaccccgcagaccgtcaacgcgtactacaacgccaccaagaacgagatcgtgttcccggcggcgattctgcaggcaccgttcttcgacgccaaggccgatccggcgctgaactacggcggcatcggtgcggtcatcggccacgagatgatgcacggctacgacgactcgggcagccagttcgccgccaacggcaacttcgacaactggtggaccgacgccgaccgcaaggccttcaccgagcgtaccgaccagctggtcgcgcagttcgacggctatgaatcggtgccgggcgtgttcgtgaagggcaagctgaccctgggcgagaacatcggcgacctcggcggcctgaccgtggcctacgacgcgttgcagatggcgctgaaggaagacccgaaggcgaatgtcgaagtggatggccacagccaggaccagcgcttcttcatgaactgggccaccgtgtggcgccgcaacttcaccgatggtgagctgcgcgtccgcctgaacaccgatccgcacgccccggccaacttccgcgccaacggcgcaccgtcgaacatgccgtcctatgccgctgcattccagtgcaaggccggcgacgcgatggtgcgtgccgacgacaagcgcgtggtgatctggtaatcgatcacccgtgactgcgtgatgcgaaaggcccggcgaatgccgggccttttgtcttccaggccggtagcgcagcgccgactggtagagtcgactgtcagtcgactatcgcgcgcagcgcgggattttcgcgatctggacgacgagcagtcgactgacagtcgactctaccgacgggtcgtttcaccttccggaagatctcaggccagctccggctcccgcgccagcatgcgatggaagcgctgcagcacgtagggatccaccagccctccagactgcgaatcgatgatccgcaacgcggtttcgtgctccatcgcgtcgcggtacgggcgcacgctggtcatcgcatcgtaggcatcggcgatggtgacgatgcgcgcgcccagcgggatggattcgccgcgcagcccatcgggatagccgctgccatcgaaggcttcgtgatgggcgcggatcagccgcgccacgggcgcggcgtcgctgcggccggtggccaggaagatgtgctcgccgcgcaccggatgctcgcgcatgatcgcgcgctcctcatcggtatgccggcgcggtgccagcagtacgtcgtcgggaatgccgatcttgccgatgtcgtggaagcgcgcggccaggccgacctgcgcacaggcctcgtcgtcgagatcgcagtgcgcggccagccgctgcgcgaacaggccgacgcggtcgcagtgatggcgggtgtaggcgtcgcgcatctgcagcgacatcgagagggcatcgatcaggcaggcctgcgcgtgcagcaggtcgggggcgggtacggcgtcaggaaacatggtcatccgcccgcaccgggtggggaccggtgcggggtgttcggggggcgatcaacccggggcgagggtggtcagaagggcgcgggccgcgttgaagcggtcttccggcaacggcagcgggtgcttgatgcgcagcttgtcgggcccttccatggcgtacaggttcggttgcttctggatcagctggatcaccgccatcgggtcgatgttcggcttggattcgaacacgatgcggccaccattttcgcccaggtccagcttgcggatgcccagcgtgttggccttcagcttcagctcggcgatggcgaacaggtgcttggccgcatccggcagcaggccgaagcgatctatcatctccacctgcagttcgcgcagcgcatcgctgtcgcgcgcgctggaaatacgcttgtacagggtcaggcgggtatgcacgtccggcaggtagtcttccgggatcagtgccggcacatgcagttcgacctcggcaccacgcacttcctcgccggcatcaaggtcgggcagcttgccctgcttgatgctgcgcaccgcgcgctccagcagctcggtgtacaggctgaagccgacctcggccatctgcccgctctggtcctcgccgagcagttcgccggcaccgcggatttccagatcgtgcgtggccagggtgaagccggcgcccagctcgtccatcgaggcgatcgcttccaggcgcttctcagcgtcgggggtgatcgcgcggcggtcgggcgtgatcaggtacgcgtaggcgcggtggtgcgaacgtccgacgcggccacgcagctggtgcagctgggccaggccgaaacggtccgcacggttgatgatgatggtattggcgttggggatgtcgatgcccgactcgatgatcgtggtcgacagcagcacgttgaagcgctgcttctggaaatccagcatcaccttttccagctcgcgctcgggcatctgcccatgggcgatgccgatgcgcgcctccggcaccagctcggacagctcgcgctgcatgcggccgatgctttccacgtcgttgtgcaggaaatacagctggccaccacgcgccagctcgcgctggaaggcttcgcgcagcagcgcgttgtcccactgggtgatgaaggtctgcaccgccagccggttcggcggcggcgtggcgatgatcgacaggtcgcgcaggccggccatggccatgttgagcgtgcgcggaatcggtgtggcagtcagggtcagcaggtgcacgttggcgcgcagcgccttcagcgcttccttctggcgtacgccgaaacgctgctcctcgtcgacgatgaccatgcccaggtccttgaacttcacgtccggctgcagcaggcgatgggtaccgacgatcacgtcgatggtgccggcggcgaccttttccagctcggccttgatttccttggtggtcttgaagcgcgacagcacctcgaccttcagcgggtaatcggcgaagcggtcgcggaagttgcggtaatgctgttcggccagcagcgtggtcggcaccagcacagccacctgcttgccggcactggcggccgcaaaggccgcacgcaccgccacctcggtcttgccgaagccgacgtcgccgcagaccacgcggtccatcggctggctgctggccaggtcgcgcagggtggcgtcgatcgcggccagctggtccggggtctcctcgaacgggaaaccggccgcgaacggctcgtacatcgcgcggtcgacctgcagtgccaggccggcacgcgcctggcggcgggcctggatctccagcagttcggcggcgacgtcgcgtactttctcggcggccttgcgcttggccttgctccactgctcgccaccgagcgaatgcagcggcgcggtttccgccgacgcaccggaatagcggctgatcaggtgcagctgggcgaccggcacatacaggcggtcgcccttggcatattcgatttcgaggaactcgccgggcatgccgccgacgtccatcgcgatcaggccacgatagcggccgacgccatgatcctcgtgcacgatcggcgcgccctcggtcagttcaccgaggtcgcggatgatcgcttccggctcgcggccggcacggcgcgtgcgccgggtgctgccggcgcgctcggggaacagctggcgctcggtcagcaccgcgatgcgcggatcgtccagcgcgaagccatcctccagtggtgctaccgcgatcgcgaagcgcgcatcatcggcgaggaagctgggcaggtcggccaccaccggcggcttcagctcggcggcctgcagcacttccagcagcgcctcgcggcggccgggtgaatcggcggcgatcagtacccggcccggataatggccgaggaaggatttcagcgcatcgccagcgggggcttcgcgcgcggccaccggcagcgggggcagcggctggtcgcccagcgcgtgcgcgtcggcgatgcgcgcatggtcagccgaccacacctcgatgcgcggggcatcgttcaggcgctcgcgcagcagctccggcgacaggtacaacgccgacggcggcagcagcgggcgctccacatcatggcggcgctgctcatagcggtccgcagtctgcgcccagaacgcgacggacgcttcatacgcaccggcacagaccaccggcaggctgccgctgggcaggtagtcgaacagggttgcggtgcgttcgaagaacagcggcaggtagtactcgacgccggccggcgccagtccggacttcaggtcctggtacagcgaactgcgccgggtatcgacatcgaaccgctcgcgcagcgtggccagcacgcgggcgatgctggcttcatccatcggcacttcgcggccgggcagcatgtgcaccgcctcgaccttgtccagcgaacgctggctttccgggtcaaaggcacggatcgagtcgatgtcctcgtccagcagttccacccgcagcggttcgtcggcacccatcgggtacacgtcgagcaggccgccgcgcacagcgaagtcgcccgggtccatcacctgcggcacgttgcggtagccggcgctttccaggcggcgcttctcggcttccaggtccaggcgctggccgaccttcaggtcgaagctgccaccgatcacgtagctgcgcggggccagctgctgcagcagggtctgcaccggcacgatcaccaggccacgcttcagcgcgggcaggcggtgcagggcggccaggcgctgcgaaatgatgtccggatgcggactgaagcggtcgtagggcagggtttcccagtccgggaaggcgaccaccggcagggccggatcgccgccgagcagggtgtgcaggtcggcttcgagctggttggcaccgtggttgtcacgggcgatcaccagcagcggggcgtcgtgcgcacgcgcggcctgggcaaggtaccaggccagggcggtcggcgaggcgggggcgcgccaccaggcgcggagctggccggcgcgcggcagcggcggggcggggtatgaggtacgcgacatggacaccggattttagcagaagcccgatcgaagcccggtgggtcgtgccggccgatcgccggcagcctcatgtgccgttggggtaacgcagttcaggccagcggccggcactaccggcaggcgtcgccgggcggggcccggcgcatctgtcagttgtccagctccagcaccatccgcaccaggccttcggcaccggccgggtgcgggaccggcttgaagcccagcgaggcggccagctgtttcatcggctcgttctcggcggcgacgtcgccgtacaggcggtccaggtacttgccgcggccccacttcaccagcttgcgcatcagctgccggcccaggccctggccaatgaggaagcggctgatcaggatcgcgtactcggcttcacgggtgccggggatgatcgaggcccgggcgaccgcgccgaccaccgcttcgccagcaggcagggattcggctgcgaccagggtgatctcggtcttgggattcgggtgggtcaggcgctgggtggtttccggcgaaagctcggtcaccgcctgcaggaaacgatcacggatttcttccggcccgaacaggctgaacgccgcttgcagcggtgcgccatcttccgggcggatggggcggatcagcagctcgtggccgctgggagccttgaagatctcatgccagggcggcatgcggttgcgagtggccataccgggtgattccttggtggtccatcgattgtggcatcaccggggctgcattccgtgaacgaaaggctcacggcggtacagcctcgtgaaggccgtcattcgggggctttgagccaatccaggcgggtgctggcccccggttcgcccaggtgctggcgcagcgccggcagggccgggccgaccacccggtcgaactgccacggcgggttgagcagcagcatgccgctgccgttgaggcgcagcggcgagtcgtccgggcgcaccaggaactcgatcgtcatcgccgatttcaccggcagagcggtggccttgcgcaggaagtgcaggatggtgcggcgctgcttgatcgggaaccacaccgcgcaggtcgcctgcggccagcgcgccagggtctcggccagggcggccagaacggcctggtactcggcgtcctgggcctcgtacggcgggtcgatcagcacaagaccacggccgatcttgctgccgttgaacttcggcggcagcagcgagcgcagcagggcatagccatcgccagcgcgcacatcgacgcggctgtcatgggcgaacagggccttcagcgtggccgtttcggcttcctgcagctcgcagaccgccatgcggtcctgcgcgcgcatcgcctgtgcgctcagcagcggcgagcccgggtagttggtcagcgcgcccaccgggttgtcggcctgcaccgccttcaggtagcgctcgaccacctccggcagcctgggctgggccatcagccgcatgatcccggattcggcctccagggtcttgcggctctcttcgctggccagcaggtagcggccggcaccgccgtgggtgtcgagcacgaagaacgggctgtccttgcgcttgaagctgtcgatcagggccagctgcacgatgtgcttgagcacatcggcgtggttgccggcgtggaaggcgtggcgatagttcatgggcggcagtgtacggggcggcggccgcagcggctatgctgcgcgccatgacagctcccgttgcccatgtcctggtggtcgaggacgaagccgccatcgccgaaaccgtgctctatgcgctgcgcagcgaaggctatgccgccagccactgcctgctgggcggcgaggccctgcaacggctgcgggccggcgatatcgacgtggtggtgctggacgtgggcctgccggacctgggcggtttcgaggtctgccggcggctgcgtgcgcagcccgggccggcggcgcagctgccggtgatcttcctgaccgcccgcaacgatgaagtggaccgcgtgctcggcctggaactgggcgccgacgattacatgaccaagccgttctcgccgcgtgagctggtggcgcgggtgcgtgcgcgcctgcgtcgcgtggcaccggtcgtggcagcccccggcgcagatgcgggctggcaggaacatggcgccttcgccatcgaccgcgaaggccggcgtatccgcttccgcggccatgcgctggacctgacccgatacgagtacgcgttgctggaagcgctgctgcagcgccccggtgccatcctcagccgcgcgcagctgatggaccggggctgggacagcagcgccgacagtgccgaccgcaccgtcgacacccatgtaaagacgttgcgcgccaagctgcgtgcggctggtgccagcgacgacccgatccgcacccaccgtggccttggctacgcgctggaggtctagccgatgcgcctggtactgaagctgttcctcggcttcttcctgatcaccggcatcgccgcgttcttcgtgatgcgcgtattcgtcaacgaggtgaagcccggtgtgcgccaggcgatggaatcgaccctggtcgatgcggccaacgtgctggccgagatggccgccgccgacgtcaaggacggcaccatccgcagcggcagcttcacccgcaacctggccaaggcgcggcagcgcgacctgaaggcgatggtctggcgttttcccaagcgatcgctggattaccgggtgaccatcaccgatgccaagggcatcgtcatctacgactcgctgggccgcgacctcgggcgtgacaattcgcgctggaacgatgtctaccgcaccctgcgtggcgagtacggcgcccgctccagcccggaaataccaggcgaagaaggcgatacggtgatgcacgtggcggcgccggtatacgacccggccgatgggcgcaccctgatcggcgtgctcagcctggcccagcccaaccgcagcatcgatccgttcatcgccgccagccagcgcgccatcatcgagcgcggcgcctggttgatcgggctgtcggcgctggtcggcgtgctggtgacgatgtggctcaccaccggcctcggccagctcagccgctatgcacgcgcggtcagcgccggcgaaccggtgccaccgccacggcgccgccgcgacgagatcggcgacctgggccaggcgctggaaaccatgcgccgcaagctggagggcaaggcctatgtcgaacagtacgtgcagtcactgacgcatgaaatgaagagcccgctggcggcgatccgcggtgccgccgagctgctgcaggagccgctgcccgaggccgaccgcgtgcatttcgcgcgcagcatcgtcgaccagcaggagcggctgaccgagaccatcgacaagctgctggcgctggccgaagtggaacagcacggctggctgcagacccgcgatccgatcgcgctgccaacgttgctggccgatgcggcagcggcggcgcaggtgcgtgcgcaggcggccggcgtgcaggtcagcatcggcagcgcgcccgacctgcgcgtgcagggcgatgcctatctgctgcggcaggcgttgcacaacctgatcgacaacgccattgccttctcaccgcccggcgcggacatcgcactgcaggccgaggtggacgggcagggcgtgcgcctgcaggtggcggatcgcggtaccggcattcccgactacgcgcgcgaacgggtgttcgaacgcttctattcgcttgcccgccccggcagcggccggcgcagttccggcctgggcctgccgttcgtgcaggaggtcgcgcgcctgcacgatggtcgcgccagcctcgacgcgcgcgacggcggtggcaccgtggccagcctgtggctgccgttgtcagtgccgggccagcgttcgcgccgctgacttcacactcgcttcaacttcgccacaaaccctgctcaccgcagcggtccatcctgcagccctctccaacgaggatggaccatgaaatccctgaagatgctgctgaggttcgccattgtcggcgggctgatcctgttgttgctggtgccgctgatgatgatccgcggggtcatcaccgagcgcagccagtaccgcgacgaggcctttgcccgggtggccgacagccgtgccggcacgcagcagctggtgggcccggtacgggtggtgccgtgggtggaacgcaagcaggttgaactggttgacccgctgggcgtcaagaagaccgagatccaggtgaccgagggccactggctgcagatgccggcgtcgctggaggtgggcggcgagatgctgccgagccagcgcgaggtcggcctgttcaaggtgccggtgtacagctggaatggccagttgaaggcgactttcgccgaagacgactatccggtgaagaacggccgcacctatggccagccctatgtggcgctgggggtttccgatgtgcgcggcctggtgggcacgccgaacctgcgggtggacggcaagcagctgcggttgctgcccggtgtaggcgtggccagcgaaatcggacgtggcctgcatgcgccggtgagcggtttcgccgcggatcagggcggcgcgctggccgccagcaccgttgaactggagctgcgcctggatggcagccgcatgctgtcggtggtgccggtgggcgatgacacccggatcgcgctgcggtcgagctggccgcatccgtcgttcagcggcgccttcctgccgaacgaacgccgtgtcgatgcacagggcttcgaagcacgctgggcggtgtcctcgctggcctccgatgcacagcgccagctgcgcagcgagggctcgatcgattcgcaggccgtgacggtgtcgctggtcgatccggtcgatacctacacccaggccgaccgtgcctcgaagtacggcgtgctgttcgtggtgctgaccttcgtcggcttcatcctgttcgaactgatcaagtcgctgcgcatccatccgctgcagtacctgatggtcggcctggcgctggcgatcttcttcctgctgctgatcagcctgtccgagcacatcgcgttctggaaggcctacctggtctcggccgtggcctgcatcggcctgcaggcggtgtacctggccaacgtgctgggccactggaagcgcggccttggcttcgctgcgctgctgaccgtgctgtacggcgcgctgtatggcctgctggtgtcggagaacaacgcactgctgatgggatcgctgctgctgttcgtgatcctggcgctggcgatgtgggtgacccgccgggtcgactggtacgcgcttggcgcggacctgaagtaaggagcacgccatgagctggcgccagggattgcggcaacgggcgcggcagggcattccggccctgctggaagtggatgcactgctgcaggcacatggcgtgctggcggccctgccgggggcacggatcgcccccggtctggtccgcttccagctggccgcggtgacctgcgagggattgcagggcaagggcctggcttggttgcagggcgcgcggcagggacgcggtgcgctggcggggaaggtgccgcgctaccggccatggaaggccggggcggaagcacttgcagaaatcggcatcggtggcctgcccgatgactggcccgcgcatgcggcggtgtatggctgcagcagcatcgaccggcggcactggttgctgctgctgccggagcgggcgcagctgtggctggggtggagtgggtgaggtggtttggcagatgcgacccaaccactcttctgtgggggcgaaccctggttcgcacgcttccgcgccgcccatgaccgatgggacggtatcgcggcgccgctgctggctagactcgatgggttgatgagcaggccggaaggcaggggtgcgatgtgttgaagtggggcgtgctggccgtagcgctggcaatgggtggcaatgcagcggcgcagcagcgcgaatcagtggacctggacatggtcagccgcatccgccaggaggccttccaccgttcgcaggtgatggacaccttcagctatctcaccgaacgcatcggcccgcggctgaccaactccccggcgatgggccgcgccaacgcgtggacccgcggcaagttcaacgaatggaagctggacaacgtccacgacgaagcgttcgatgactttggccgtggctgggagttcacctcggccagcgtggaaatgctgggtgaccgtgtgcagccgctgcatgcactgcccaaggcttggacgccgggcaccaaggggccggttgaaggcgagctggtgcaggtcgagatcaagaagcccgaagacatcgagaagtaccgcggcaagctgcgcggcaagatcctgctgctgggcgaggcgcgcgagtacaagcgcggcaccgagccggattcccatcggcatgacgcgacctcgctggaaggcctgcaggcgttcaccctgccgaaggaccaggacgccaccgccgaacgtgccaagcgggtcaaggagtaccaggaacgccagcagctggcgacgagggtcaatgcgttcttcgtcgaagaaggggcgctggcctcgatcagcatcagcagctgggacaacggcatcatccgcgttgccggtggtggttcgcgcaaggccggcgagccggtcggcatccccgagctggcgatgatcagcgagcacttcaacccgctggtgcgcgcgctgaaggccgggcagaccgtgcgcctgcgcgtggatgtggccgcgcgcttcaccgatgacgccgaccagcccggctacaacacgctggcggagatccgcggcagcagcaggcctgatgaagtggtgatgatcggcgcgcacctggattcctggcacagcggcaccggcgcggccgacaacgccgccggcgtggcagtgatgatggaggccatgcgcatcctcaaggccaccggcgccaggcccaagcgcaccatccgcgtggcgctgtggagcggcgaggagcagggcctgatcggctcgcaggcctatgtggccaagcatttcggccggttcccggagcccaccgacccggcgcagaaggcgctgccggcgtcgctgcgcgagccgaccggtgcactgcagaagacccgcgattacagcaagttccaggtctacttcaacatggacaacggctccggccgcttccggggcatctacgcccaggaaaacctggcggcgatgccgatcttcgaagcctggctggcgccgttccatgacgtcggcgccaccaccgtggcgacccgcaacaccggcagcaccgaccacatcagcttcgaccgcatcggcctgccgggcttccagttcatccaggaccggctggactacttcaccaatgtccaccacagccacctggacacctgggaccacgccgaaccggaagacctgaagcaggccgcagccatcgtcgcctcgttcgcctacaacgccgcgatgcgcgagcagccgttcccgcgcaaggtggagccgtaaaaggggacggaggggattaagtcgcatctcccctccgtttcccggttgcagtacccacgggctgggcaatcgcgacttaatcccctccgtcccctttttccgtcgggggcggcgggctggtaaaatcgggggattcccgttcctcgagccgtccatgacctgccgcacccgcttcgcccccagtcccaccggctacctgcacatcggtggtgcccgcaccgcgctgtactgctggctggaggcccgccaccgtggcggcgagttcgtgctgcgcatcgaggacaccgaccgtgaacgcagcacccagggcgcgatcgacgccatcctggaggcgatggagtggctgggcctggactacgacgaaggcccgatctatcagaccgaccgcgtcgcccgctaccgggaagtggcagagcagctgatcgccgacggcaaggcctactacgcctacgaaacccgcgaagagctggacgcgatgcgcgaggccgccatggccaggcaggaaaagccgcgttacaacggcgctgcacgcgaactgggcctgccgtacaaggacgacccgaaccgcgtcatccgcttcaagaacccgctggaaggtacggtggtgttcgacgacctgatcaagggccgcatcgagatcgccaacagcgagctggatgacatggtcatcttccgcccggacggctaccccacctacaacttcgcggtggtggtggacgactgggacatgggcatcaccgaggtcatccgcggcgacgaccacatcaacaacaccccgcgccagatcaacctgtacgagggcattggtgcgccggtgccgaagttcggccacatgccgatgatcctggacgagcagggcgccaagctgtccaagcgcaccggtgcggccgacgtgatgcagtacaaggacgccggctacctgcccgacgcgctgctgagctacctggcccgcctgggctggtcgcacggtgaccaggagctgttcagccgccaggaactgatcgacctgttcgacgtgaaggactgcaattccaaggcctcgcgcctggacatggccaagctgggttgggtcaaccagcacttcctgaagaccgaggacgtggccgccatcgtgccgcacctggtctaccagctgcagaagctgggcctggacgtggccgccggcccggccccggaggatgtggtgatcgccctgcgtgaacgcgtgcagaccctgaaggaaatggccgagaaggccgtggtctggtaccagccgctgaccgggtacgacgaagcggcggtggccaagcacctcaaggccggtgccgaggtggcgctgggcaaggcccgcgagctgctggcagcgttgccggagtggaccgccgagtcggtgggcgtcgccctgcacgacgcggccgcagcgctggagatcggcatgggcaaggtcgcccagccgctgcgcgtggcgatcaccggcacccaggtcagtcctgacatctcccataccgtgtacctggccggccgcgagcaggccttgaaacgcattgatgtggccatcaccaaggtagcaacggcctgaggcatccttgccaggcccgaaccggagaacacgcatgcccgccaagaccgccactgcctgtaccgccccgcaccaccacgtccacgacgcatcggatttcgtggcggtggtcgagcgtgtctcgcgcgaacgcgggctgcgcctgaccccgatccgcgccaacgtgctgaagctgatcgccgaggccggcaagccggtcaaggcctacgagctgctggaatgggtgcgcaacggcaagggcgtgggcgccgatgccccgcccaccgtgtaccgcgcgctggacttcctgatggccaatggcttcgtgcacaagctggaatcggtgaatgccttcgtggcctgccaccatcccagcagtgccgcgcattcggtgccgttcctgatctgcaacagctgccacagcgcggtggaactggaagaccgcgagatcgtcacccagctggagaagcgcgccaaggagctgggcttccagccgcaggcacagacgctggaagtgcatggcctctgcgcgcgctgcgccggctaacgcaacggtagggccggccgctggccggcattttggaaacggggtcagatccctttgccactggcaaagggatctgaccccgtttcataccggtgcggcagggcctgcgtcctagtccatcggcttggaccgggtatccacccgcacgatcaccgacatgccgggccgcagctgctttgccagcttctgatccctgttgatcgatatccgcaccggcagccgctgcaccaccttggtgaagttgccgctggcattgtccgggcgcagcacgctgaattccgacccggtggctggggcgatctcctgcacgcggccccgcagcacctggccctggaacgcgtccaccgagaacgtcgccggttggccgaccgccatgccccaggtctggccttccttgtagttggccaccacccacagcgtgtcaggtaccaggaacagcagctgcgaaccggcagcgacgtactggcccacgcgtacgctggcttcgctgatctggccgtcgcgtggtgcgtggatcaccgtgttggccaggtcgatgcgggccagttccagctgcgcctgcgcgctttccacctgcgcttccaggctcttgcgcgcgacctgggtcgacaccagcgtttcctcggcgatgcggatctgcgcctgcgactgctgcacgctggcctgtgccgacgcctgggtggtgcggaacttgtcgcggtcgttgatggacaccagctgctgcgccgccagttcctcgtagcgtttcaattcattgcgcgaacgctgcagttcggcctggccagccgacagcgtggcgcgggcggaggcaatctgtgcgcggttctgcgcctgtgactggtccgagttggccagcgccgcgcgcgcgctgtccagcgtcgcctgcgcctgggccacgcgctgcgcatagatgcggtcatcgatgcgcagcagcggctcgccctgcttcacatgctggaaatccttcaccagcacttcggtcacatagccgttcacctgcggcgccatcaccgtgatctggccgcgtacataggcgttgtcggtcaccatcacgctgctggtgaacggccacaggtgccaggcgcgcaggatcagcgcaatgcccagcaaggccactaccaccatcaccaccacgctgcgggcgctgggcttgaggtacttcggcgcgaccgcaggttctaccggcgtggccgcgggcgccgcgtcggtcggcggcggtggggtgacgttgtcggtgtcgtcggggcggggcgggacgggaggcatgggaggactcaacgggacgcggccggcgtggacgcggtggaaagggcggggtggcgcttgcgccattgcttgagcacggcggtgcgcagcgacagcagcagcaaccagcacaggaagccgatcgccagccagccgctcagcgtgaacacgtcattgaagccacgcacgttggcttcgcggcgcgtggtctgcgccagctgcgcgctgccctgcgcactgcgcagcaccgggtcggtgatctgcgcagcgtacagctgctgctggatgcgcagccgttgcgcgaccaccggatcggccggatcgagctggctggtcagcgcgctggaatacagctgctcgcgatgcagctggaaggtccccagcaccgccgaacctgccaggccacccagggtctgcgtgatcgacagcgtcaccaggaaggtgatcatgtggtcgacgccctgtttcaacgcggcggagatgccgagcatgatcagcgggcccatgaacatgccggcaccgaccgaggccaggaactggctggcgtagaagtcgtgcggccggtccaggctggtgcggtgctggtcgaagaacgcggcggcgcccagcagcaggatcgccatcagcagctgcgcgatcagccgcttcggtccgaaggtgagcgaggcgccggcgatgccgacgatcaccccggccaggatcactacgaacaacggccgcatctggtcaggccccatgcccagcgtgcgcatcaggttgaccacgccgtaggactgctcggtggtcaggaagcggatcaggaacgcgccgacgatgaagtgcagcaccggcagcttcgacagccagcggatctgcagcagcggattgcgccggtagtgttcgatgatgaaggcggtggtggacagcacgatcgaggcgaccagcgcccagcccagccatggggtgttgagccaccagcgcgtgtagccctgcgccagtacgatcaccagcagcgcgaccgccggcgcgagcagggcgaaagtgaggaagtccaatggctcgaacgcctttacctggatgcccggcggcagcttcagcaccaccactgccgcgaacgcgcacagggccaggccggcttcgaaggagtacagctggtgccattggccggtatcgaccaggcctggtgaaacgatccaggcgatcggcaccgccagctgcgacaggccgacaccgaccaccagcagattgccggtgaatcggcgcggcagcgcctgcagcatgtacagcgtgcccagtgtggaacaggccgcacccgcgaagccgctggcggctcgggtcagcatcgtggtctcgaagctgccgacgaacaggtgcagcaccgccagcgccgcatacaggcccaggccgatctcggcgaacaggcggatgccgtactgctggcggaacttgaaggccagcaggttggcggtgacattcaccatcgcatacgcggccaccagccagctgccctgggtcggagtgagcgccagctggccctgcaggaacggcaggttggcggtgaccagcgcattgccgaggccgccggtgatcgccaccagcaacgataccagcgcataggccgcgcgccggtacggcgggtgccagggcatcgacgccgagccgggcatggtcggcttctcatgctcctcccaatccggaaccggcttcagatacggctggaccatcaacgggcctcgctggcagctccctggagacccccacgcagcagctgcagggcacgcccggccaactgggcgcgctcgtcgcgggtcttgccgcgcagggccgcacccagcatgcccgagatcagtgaaatatccgtcttttccaggtcgtcacggcacagcccggcggccttggcgcgcgcgatcggttcctccagcaggtcgcgcacggtctcgcgcgcggcgcgcatggacggcacgtccgaatcaaccgcacgccagtaatcggccagtgccggcgaatcgatgatgcgctgggccatgccctcgaacacctcgaacagggcgtcatcgcggtcaccgagctgttcgacctggcgccggatgcggtcgaccgtgcgctgcagcagcgcctggatcagcgcggtgcggtcggggaagttgcggtacagggtggcgcggcccacctgggcgcgttcgaccaccagatccagcggggcggtgacgccatgttggccgaagacatgatcggcggcgtcgaggatgagggcacggcgggcagcagcatcggcacgttgagcggtcatggaatcattttcggacaaaagtgtccgattggcgagactttgagtgacgggattgtccggttgttgtcgtacgcacacctttgtgacggatgcgtgatggcgtgggacggaatgaaaacgggggcccgaaggcccccgttcaatgcggtggtgccagagccctttccttcggaaagggatccgaccccgccgtgcgcgatcagaagaacgcgcggatcccgaatgcgactccacggcctggcagcggcgagtagtcgcgcagcagcgaggtatgcgggcgcacttcgcggttggtcaggttgctgccatccaggaagacctcgtagctgttgcccgcgttgcgatcccagcggtaggccaggtgcgcgtcgaccagggtgtagccgtcgctcggggcttcgttctgggcaacgtccttctggcggctgtaacgcaccgcaccgaccgaggcgcgccagccgtccttcgaccagcgcaggtcggcacccacgcgggccggggcgatacgcggcagatagccggtgttggccagctccacgttgtaattgtggttgtggtcgccgtgcggtacggcgatgtcgaggttgcggctgccgttgccatccagcttggccttcacatagtcaccgaacaggcgcagatcccagtcaccggcgccaccctcgaacaggtgcaccagcgcttcggcctcggcgccgcggaacaccgcgtcctgctgggtccaggcgcggaccggcaggccttcggtaacaccggtgtcggcgaggtagatgaagtccttgaacttcgtctggtagaccgaggcggagaagtccaggcgatcgctgtgggtatggatgcccagttcgacgcgctggccgcgctcggttttcaggttggcgtcgccgatctccagcgagcgggtggcgatgtgcgcgccggcggcgtacagctcttcgttggtgggtgcacgctctgagctgtccacgccgatgcgcaggtcaacggcatcgttgagcttccagataccggcggcagacaggttggtggcaccgaacgtgcggcgacggtagtcaccggtcgggtccagcttgacctggtcgtggcggccacccagttccagcttgaacgggccgaactgcttttcctgcagcacgaacaggccgatgttcctggtgccggtatccggtacgaacgcctcttcgcccttggcgccgaaatcgctgttgccgaactgcaggccgaacgcgccgtcccagccgccgatctgctgctgcacggcttccaggcgcgcttcgataccacggttggtgaagcgcgtcgacggcgtgccggcctccagctccacgtgctcgtagtcggtgtaagccacgcgtgcgttgatgttcttcaggaacgagaccgggttgtagatgccggccttggtctcgaagcggttctgcaccatgtcgatgcgcacgtcatgctcgtcgccgccttcctcttcatcgccgtggtcgtgaccgtggtcatggccatggtcatcaccatcggcatgcacgtgcgcgccgttgggaatgccgtagttggtgcgataggtgctggccgacacaccgaagtaaccaccgtcgcccagccacgttgcgccgacgccgccggcgcgggtgcggatcgaactgttgtccaggcggccgcggcgcggttcttcgccctcggctgcatcgtgatcatggtcgtgatcgtggtcatggtggtcttcaaggctgtcgatcaccgcgtagccgggaatgcggtagtcgtcgccattgcgcaccaggccatccacgtgcagcacgacattgccgctgacaccatcgaggcggaacatgccgctgcgctcattgttcaccgagttgccgcgcagctcggcgcgaccgctgagcgggcgctccggcagttcgcgcgcgatgcggccatccaccacattgaccgcaccaccgatggcgccgctgccgaacagcagcgtggccggacccttcagcacttcgatctggtcggccaggaacggctcgatgctggtggcatggtcggcgctgaccgtggaggcgtccatgttgcccatgccattggacagcacggcaacgcgcgggccttcctggccgcggatgatcgggcggccgacgccggggccgaagaaggtgctctgtacgccgggcagcttggccacggtatcgcccagggtgccggccttctgctcgtccaggcgctcaccggccagcacgtccaccgggcgcgccagggattcggcatcgccctgcagcggcgacgcggtgacctgtaccgaggagagttcggtcaggtggcggtcacggtgggaggtgtcctggccggctgcaaaggcgacggacggcaacagggcggcgagggccaggaccagggaatgcggcttgagccgaggggtgtgggcgggcatgggcaggtcctttgttacaatgtatcaatcgcagggcgcacgaatcccgtcgaggggacagggggaggggaaaccgtgcggttcggagagggatgttatattattccataacgattcgccgaccctgctggaagtcatgtccctgtcctcacgcctgcgtcacctgctcgaccgtttcggtgccactggttcgatgctgtgcgcagtgcattgcgcggtgatccccgtgctgctggcggcggcgccgtcgctgggcctgtcgttctggctgagcgatggcgtggaacaggcgctggtggtgttcgtgaccctgctcgggctgttcagcctggtctggggctatcgccgccacggtgcgctgcgtgcgctcggcttcctgatccccggcctggtcgcgctgtgggccggcgtgctgtacgacccgctgcaccacaatgcggtgccgcatgcggtggtgatgaccatcggcggcctgctggtgggcgttgcccacctggtcaacctgcgcctcaaccacggccacgtgcacgacgcaagctgcgcgcactaggcacgccgtgataggatttccgatcgtgcgcgggggcgcccagcaaggcggccccgccgaacccgtgtcagtacggggtaaccagatttcacacttgaggagttgaagacatgggtaagggtgaccgcaagaccgccaagggcaagcgctacaacgccagctacggcaacgcccgttcgcacaccgcgagcaaggtcgccgtaggcgccgccgccccggttgccaagaagaccgtggccaaggctccggcgaagaaggccgtggcgaagaaggccgtcgccaaggcctgatcaggccgaccgaccggtccaaggaaaacgcggcgcctggcgccgcgtttttttatgcgcgttcctgcagggccgagcccatgttcggctggcgtaatgcagccgagcatgggctcgctctacagggaattcagcgcaaggtctgcttcagcgtttccggattgccatcgttcggcgcggccggcacctgcagcaggtgggccagcagcgggtagacgtcgacattgtcgaagccgtcgatcaccaggccctggcggaacgaggggccgctggccacgaacactgcgcgcatggagagcagggcgttgtcgtagccgtgcgagccacggtcctgcttcgcgcgcttggcgatcttctcgcggtgcagcgcatcccagccttcatccatcgcacagacgatggccggaacccgcggatgcgtgccgtagtgccagcgcgccggcaggttctccttcttccagcactcgtagtgcgcatggcggccgagcagggcgcgttcggcctcagcctcacgaccggccactggcgcgaagcccaccgactggccctggctgacgttgcgcgcgatggacgggtcggccatcgattcggtggcgatcacgtggccgtcggcgacgctggccatgccgtggtcggacaccacgatcacattggtggtggcggccaggccgcgctgctgcaggccgtcgagcacctgcccgacgatcaggtcggcgcgtgcgatggcgtcggcgtactgcttcgacccggggccgtagttgtgcccggccttgtccacgtgctccatgtacagcgtggtcagtcgcggggcatcggcgtcggtctgtgccagccagtcgagcacgataccggcacgctgctccagcggttccttgccgtcgtagatgcgccactggctggggcgcacaccacggatttccgattcactgcccggccacgacgtcgtggcggtgcgcacgccggcgttctcggcgccgacccagatcggttcaccgccccaccaggcactggtggtgacggcctcgcggttgctcagctcgaaacggcccagcgcttcatcgtccatgctgttgttgacgatgccatggtggtccgggcgcaggccggtgacgatggtgtagtggttgggaaacgtcagggaaggataggacggtgtcatccagcgggcgcgcacgccgccgtcgatcatccgctgcaggttcggggtcagcccgcggtccagcgcatcggcgcgcaggccgtcgatggagatcagcagcagcttcggcggtgcggccgatgcgacggacgtgggaacggaggcggtaggggcaggcgcagtggtgcaggcagccaatggcagcagcagcgccagcgaacaggtcaggcgtacggaagtcatccgtgcatgataagccggtgcaattaccggcccaagacacggcgcgccaggatcgcccggggtcagatcccttttccacgggaaaagggatctgaccccgatgttcaggcgaacagcggggcctggcgttgttccagccgcagcagcgccgccttggtttccaggccgccaccgaagccggtcagcgcgccgttgctgccgatcacgcggtggcagggcaggatgatcggcaacgggttgcgcccgttggccgcgcccaccgcgcgggtcgcgctgggctgtcccaggtgttgcgccagttgcaggtagctccaggtctggccgaacggaatcagcgccagcgcctgccacacgcgcagctggaacggcgtaccacgcggcgccagcacaaggtcgaagctgttgcgctcgccgtgcaggaactgcagcagctgctcgcgtgcttccggcaaggcatccggtgcgtaaagccagtcatcacgcccgcgcgcggggtggcggttctccgggaacagcacgtgtgacaggccacgctcgtcgccggcgatggtcaacacgccgatcgggctgtcgaaacgatcgaacaacagtgtcatgtcggttctccaacgaatgtgccggacaggtgccacaggtgcagcacggcgtaggcgcgccagggacgccacggttgcgagcgcgcttcggttgcgcgttcgctcaggcgctggccctgcgcgtggccgaggacctgctgcagtacaagatcgccggccgggaaggcatcgggctggccgaggccacgcaaagcgatgtactgcgcggtccatgggccgatgccgggcagtgccacgcagcgggcaacaaactcttccagcgcctggccgggcccgaagtcgagctggccgctggcgcaggcggtggccagtgcacgcacggtcgcggcgcggctgcgcggcaggccgattgattccagaggcgcctcggccaatacctcgggtgccgggaactggcgatcaaagtcggacgacatgcccggcaggtgcgcgccataggcatcgaccagccgccgcgcgaaggtggtggcggcggcaacagtaacctgctggccgagcacggcgcgcacgcccacttcgaagccatcccagccgccgggcacgcgcagccccgggcgctcggcgatgccgcgcgccagcaagggttcctcacccaatgcggcgtgcacctgctgcaggtcggcatccagatcaaacacgcgacgcacgcggcgcacgatgtccgggatcaggcgcggatccaccgcacccagctgcaggcgcagctccgggcgcttcgggtcggcagtgacgcgcagcagggtggggcgctccggcgtgcccagcacgcgctggtagctgtcctcgccaatcagttcgatgccgggcaggctgcgcttgcgcaggaacgccagcatgcgcgggaagtccagcggtggacggtagcccaggcgcagcaccaggccgccatcgtcggcggccagcggttgatgctggcggcgcagtgcggtgggggccatgccgcagccctgcaggaatgcggtattgaagcggcgcaggctgttgtatccggcggccagtgcgacgtcggtcaccgccagcgtggtctcggtcagcagttgcttggccagcagcaggcgatgggtggcgtggatctgcccgggcgtcgcgcccaggcgttcgacgaacaggcgctgcagctggcgcgcgctgaggccgagcttcgtagcaagatcggccaccggctgctcctgcaggaagccgccgtggatcagggccagggcgcgctgtacggtctgcccggccagtgcctgctgggcctgtggtgccagctccgggcggcagcgcaggcacgggcgatagccggcggcggcggcagcagcggcggtcgggtagtaggtgatgttgcgcggcttcgggggcggtgcggggcagaccgggcggcaatagatgccggtgctgcgcacggcggtgaagaacacgccgtcgaaacgtgcgtcgcgggccaggcgggcgcgatcgcaggcggcggtgtcgagggcgagggcggtgtccatggcggcagtctaggcgggtgcgggcggggatactcgccacattcggacatggatgctgaagggggtcacgccgggctgcgcccggacccgcggtagtgccggccgctggccggcaacagcaacagcagaagcgggattcctgtgggatggcgtggtgggtccggtggcaggggacgccgtgaacccccagaccggcccagccgctggcggctgggcgttcgggcgcttgcgaagcagtgcttcgcaagcaaagcgccctcacccctggggacttggtcgcggcatccatgccgctcgcacccctgccaccggacccgccacgccttcgacaggttcctgaggccgttggtaggtgtctaccttggtcgacacgctttcccaagggtcagaaggggttcagtgccacgcgctgaatgcgcggcctggacgggtagactgtggctcttggtcccatgaatcccggttgcccgatgtccgccaaattccgctggttgcccctgttgtgcctggccctggcgggctgcagtcagctggagaatccgggcaacgtgaccgctgccgacaaggcagcgcgggcgccggccagtgatggcgagaacatggtttcgatcaatgccgccgacgcgccaccggcaccggcaccaccgcgcagccaggcgggtcggccgtggccgcaggcgcagctggaaaatgggcgtgcgtgggtcagttgcagcacggaatatgcgggcgatgccggcgacggtgccgaactggaagggctgcagcgcgagcagatcacccaggccctggcgccgtgtgccgagcgtgggctgatgcgagtgcgttacgccggcaagatcaatccgggcttcgccgaaatgatgtggcggttggcggtggtcgctgacgaactgaagatccacaagcgcatcctcgacctggactccagtggtggccaggtggagtcggcgatcgtggccggtgacagcatcggtgaatcgggctggaccatctgggtgcgcgaaggctccatctgccacagcgcctgcgtgttcgtgctggctgccggtgacaaccgcctgctgtcgggcaaggtcggcatccaccgcatgatgcggatcagctccaaggccacctcgcgcgccgagctcaaccgcgagctgcacgaagtctacgacaacgtgaaggactacctgcagcgcaatggcgtggcggtgggcgtggccgatctgatgatgaccgtgcccaatcgcagcctgcgcctgctgacgccggatgagctgcgccagtacggcctggatggcaccaacgcggtgcaggacgatctggaacggatcaagcagatgcgcgcctgcggcgatgacttcgtgcagcgcaaggacgcgttcctgatcgccttcgaccagcagtgcaagcgcgacggcgccgacatggaatcgatcaacagctgcggccaggccctgaagcagcgcttcggtttcccggatgcggtatgcccggacgaaagcccgctgtcggagatcgatgtggcgacgctgccaccggcaccgtcggagccgccgccggtggccgagcagccgccagcgaacaccgccgcgcccgccgcgcaagctgatgcggcagcggtggagggcaacgctccggcacgctgacggcgtagtcaccgcgctggcgtagactgcggttctctccagaaaaccggcggtgtccatgaagcgcgcgttcctgctgctgtccctgctgcccctgaccgtgttggcgcaggcccctgcgccggccacgcctgcaccggccccggcacgcccggcaccagcctcgccggcagctgcgaagcccgctaccgccggttcccctgcgttgaccgctgctcaacaggcgcaggtgcagaaacaggacgcggaaatgggcgccgccgcagtgaaggcagcgcagctggtcgacgccaaccgcgccggcgaattgtgggatggcgcttcggccgtcgcgcgtcgtgcggtgccgaaggccgctttcgtcagccagttggccgccgagcgcacgcgcctgggtacgctggccgggcgtggccagccgaccatcacccgggtcaagtacagcgccggtgcagcagtgccggaagggctgtacatcaacgtcagcttcccgacccgtttcgccaacagcgcacagccggtgcgcgagctggtctcgttccgtttcgacgaggaccaggtgtggcgcctggccggttacagcctgcgcgcgtcggcaccctgaggaggtgaatgatggcaactgaactgacgatgctggcctggtcggtactgctgggcttcgtgtacatcttcgccacctccacggtggtcacccgcgagcgcgggatgaagtggaatgcttcggcacgcgatggcgatgcaaagccgctcagcccgctggccggtcgcctgcagcgtgcgcaggccaacttcctggagaccttcccgttcttcgccgccgccgccatcgcagtggtcgtggccgggcgcggcaacgacaccacggcgctggccgcgcaggcctacttctgggcgcgcgtggtctatctgccgctgtatgccgcgggcgtgccctacgtgcgcagcctggtgtggctggtgtcgctgttgtcgatcctggcgctggtgttcgcacttctgtaagtcggcctgatccagatcaaggccgctcaggcgcgcggcgctatgctggcgcggactggatcaacggcaggaggcgcgcatgcgcaggttggacgtggtggtggtcggcgccggaccggcgggcctgtgtttcgcgcgtgcgctggcgggcaatggcctgcaggtcgggctggtcgaagtgcagccgcgccaggcgctggccgaggccgcctttgatggccgtgagatcgcgttgacccatgcctcgcggcagagcatggagcagctggggctgtggcagcgcctgccgcacgctgaaattgctgatctgcgcgatgccagggtgatgaacggcggctcgccgttcgcgctgaccttcgccagcagccaggtcgacggccagccgctgggctggctggtacccaaccatctgatccgtcgcgccgcgtgggatgccgtgcagggccaggacggcctggagctgttcgacgggcgcaaggtgctgggcgtgcaggccgatgcgcagggccacgtggtcaaactcgatgacggcagccaactgcatgcgcggctgctggtggccgctgacagccgcttctccgccacccgccgcatgctcggcatcggtgcgcagatgcgcgacttcggcaagtcgatgctggtgtgccgcatgcaggtcgagcgcgaccatcaccacaccgcctgggagtggttcggctacggccgcacgatggcgctgctgccgctcaacgagggccaggcatcggcggtgatcacgctgccgccgcggcagatcgaggcgctgctggcgatggacgaggtagccttcggtgaggccatcagtgcctgcttcgaacaccgcctgggccggatgcagccggtggccacgccgcaggcgtatccgctggtgggtgtgtacgcggatcgcttcgtcggcgagcgttctgcgctgatcggtgatgccgcggtgggcatgcatccggtcaccgcgcatggcttcaacctgggcctggccagcgcacagcggttggcgcagggcatcgtcgcgcagcagcgccgtggtgccgacattgccgccgccggcatgctggccagctaccagcgtggtcatcggctggcgtcgcggccgctgtacgaggccaccaatgcgatcgccagcctgtacaccgacgaccgtcgcccggcgcgcctgctgcgtgcggccggcctgcgcctggcgcagggcgtggcaccgttcaggcagctgattgcctcgcacctgacccagcgcgtggcctgaacagcttcagatcagcctgcagccagcacccggatctggctgtcggcgaattcgaccacctggcctgcgcggatcttgcaggccttgcgcagttccacttcgccgtcgacccgtacctggccctcgctgatgaccatcttggcctcgccgccactggtgaccagatcggccagcttgagcagctgcttgagttcgacgtagtcaccgtcgaggtcgaattcgagaatctgcatggagcggggttcctgggaagagggcgcaggccagcggccgggccgggaagagggcgcgtattgtgcgccagcacgggcccgacggcatctgtgaggaaagctgtatgcctcgttcagcatcaatgcggtatcattccgctctgagcgagtgaaatctcctccgaccgagcagcgccagggcacgcgataagaagggcgcccaaagcgcggaccatcaccttttttatcgcactgccaggaagacggcagtgccttcggagttccccatgtcccaagattcccaagcgccgctgcagtttgcgcagctcggcctgtccgagcccgtgatgcaggccgtcaccgccatcggctacgaaaccccgtcgccgatccaggccgccaccatcccggcgatgctggaaggccgcgacgtgctgggccaggcccagaccggtaccggcaagaccgctgcctttgcactgccggtactgtccaacatcgacctgcagcagatcaagccccaggccctgatcctggcgccgacccgcgaactggccatccaggttgccgaggcgttccagtcctattcgtcgaagatccccggcttccgcgtgctgccggtgtacggcggccagccctacggccagcagctgtcggccctgcgccgcggcgtgcatatcgtggtcggtacccccggccgcgtgatcgatcacctggaccgcagcaccctggacctgtccgagctgaagacgctggtgctggacgaagccgatgaaatgctgcgcatgggcttcatcgacgacgtcgaagcggtgctgaagaagctgccggagcagcgccaggtggccctgttctcggccaccatgccgccgcagatccgccgcatcgcgcagacctacctgcaggacccggtggaagtgaccatcgcggccaagaccactacttcggccaacatccgccagcgttactggtgggtgagcggcatgcacaagctggacgcgctgacccgcatcctggaagtcgagccgttcgacgcgatgatcatcttcgcgcggaccaaggccggcaccgaagaactggccagcaagctgcaggcgcgtggcctggccgctgccgccatcaacggtgacatgcagcaggcccagcgtgagcggaccatcgccatgctgaaggaaggcaagctggacatcctggtcgccaccgacgtggccgcgcgcggcctggacgtggagcgcatcagccacgtgctgaactacgacatcccgtacgacaccgaaagctacgtgcaccgcatcggccgtaccggtcgtgccggccgcagcggcgaggcgatcctgttcgccaccccgcgcgagaagggcatgctgcgccagatcgagcgcgccacccgccagccgatcgaagagatgcagctgccgagcgtggaagcggtcaacgacacccgcatcaacaagttcacctcgcgcatcagcgaaaccctcggcgccggtggcctggacttctaccgccagctgctggagcgcttcgagaacgagcagaacgtgccggccatcgagatcgctgccgcgctggccaagctgctgcagggcgataccccgttcctgctgcagccgccggtgcgtgccccgcgcgaagagcgcgcaccgcgcgagcgcttcgaccgtggtgaccgcccggaacgtggtgatcgcttcgaccgcaacgaacggggtccgcgcttcgagcgtggctcgcgccgtgacgacgccgaaggtggttttgaacagcgtccgcgccgtgaggttccgccgcgtggtgcaccggagcagggcatggagacctaccgtatttcggtcggtcaccagcatggcgtgaagccggccaacatcgtcggcgccattgccaacgaagccggcctggaaagccgcttcatcggccgcatcgacatccacgacgacttctcgctgctggacctgccggcacagatgccgccggacgtgctgtcgcacctgcagaaggtctgggtgtccggccagcagctgcagatgcgtgcgctggctccgggtgaagacaccaacccggccccgcgcccgttcaagccgcgcttcgacaagcgtggcccgggcggtccgggtggcccgcgtcgtggcggcccgggcggccagggtggcgaccgcggcggtgaccgcgacagtcgcccgccgcgtcgtgacggcttcaagccgcgcggcccgcgcagcttctaagccgcacccgcagccgtccacaccaccgccagcccccgggctggcggacagaaaaaggggacggaggggattaagtcgtatctggctggccatgtgcgtgtgccaagaacgacttaatcccctccgtcccctttttcgcatggcccacacattgccggtcctaggctgggccggttcctaaggaggttgtcaccgcagcacattcagggggatccgggatgggtaggagtggcacggaccaacacagccggcgggtgccgatgacccgggggctgggactgcgatttgcgctgttgaccggcatggcgatcggactggtcgcactgtccgccctgatccaggaactgcaggcggcctctactgcctggatcgccggccagggctactggtcgcgtggccagcaggatgccaccgccgcactcagtcgctacctggcgcgtggcgatgccgaggacctggacgacgcacgccaggccctgcaggtgccgttgggcgatctgcaggcgcgactggcgctggaacaggccgaaccggacgaggagaaggccaggcagggcttcctgcagggcggcaatgcgcgtgccgacatccctcgcctggtgttctcgttccgctacgcgcgcgacatcggtgcattccgcgaagcgagcgcgttgtggcggcagaccgatggcgacctgatggcgctgcagcgactgatcgatgaactgcagctgcggcacgacggcaacctggtgcccgttgccacacgcgaccgctacctgcagcagctgcgtgacctggaccagcggatgaaggtgcagagccaggcgttctcgcaggcactgctgcggatggcgacgctggtgaggctggccacgttgatggtggcgggcctgtcggtgctggcgatcagcctgatggcggtcgccctggcgcgccgcgtcggcaaggacctgaccgaacacgagagccgtttccgcgcggcgttctaccaggccaacgtcggcatgctcaagttcgatgccgaaggcaaggtgatcgaggccaaccaggcgatggccgatatcctcgaccatcgtcgtgacatgctgctgcagctgtcgctgggcgacctgctgatggacggcgagctggtcatcgatggggtgggccgcatcgattgggaccgccagctgcgcccgagcgaactgcgctttcgccgtcgcgatggcagccttgtctggggccgctggagcggcaccggcgtgcgcagcaccggcggtggcctgtcggtgttcgccatcatcgaagacgtcagccagaaccatgcactggcgcgcgagatcgagcaccacgccagccacgacccgctgaccggcctgatcaatcgccgcgagatcgaacggctgctggaacgcgcgctgctgcaggtgcgcagcgaaggtggcacgcacgcgctgtgctacatcaacctggaccatttcaagctggtcaacgacagcttcggtcacgccgccggcgaccagatgctgcgcagcttcgccgactacctggtggcggcggtgcgcgatggtgactgggtgggccggctgggcgcggacgagttcgccgtgttcctggcccatgccgggcaggacgaggccaagcgcgtgctgcagcgggtaatccgcaacctggggcaggcgacgttcccggtcagcgaaggcagcccgcagctgagctgcagcatcggcgtggtcgaggtcagcgccgatgcgccggatgtgaactggctgatgagcgccgccgacagcgcgtgctatgcagccaagcaggccggccgcaaccgcgtgcactgcttcaacgagaaccgcatggcgctggaggaacggcgccaggaagccgagcggctgcagggcgtcagcctggccatggccgaaaaccgcatggtgttgtatgcgcagcgcatcgcccgcgtcggcgatccctcctacctgcactacgaggtactggtgcgcatgcgtggcagcgatggcagcctgcacctgccgggccagttcatgccggcggtggagcgctatggcatggccgtggcgctggaccggcacgtgcttggcctgctgttccggcacctgcaggtgtgcccggcacacgtgcggcagctgggcctgtgcaatgtcaacgtttcggcgcagtcgatcgccgagcccggcttcctcgccttcgtctgcgacctgctggagcgcaaccgcgcgctggcctccaagctgtgcttcgagatcaccgagaccgctgcgatcagcaacctcagccaggcgcgtgccttcatcgatgcagtgaaggcgcgtggctgccggatggcgctggacgatttcggttccgggctgtcctcgttcggctacctgcgccagctgccggccgacatcctgaaaatcgacggggccttcgtgcgcgacatggataccgatccggtcagccatgccaccgtgcgcgcgatcagtgaactggggcgcgagctgcagatggaggtggtggccgaatgggtggagactgccgacgtcgccgccgcgctgacccgtcttggggtgcagggcctgcagggttatgcggtcgagcggccgcaaccgctggagcggatgaccctggccgacctgcggccggtgcgcctggtggcggtgaaaggtccgcccgccgctggctgaacgcccgtcggcgactttggtctacacgtgggctgcagccgcggctgcgataatgcccggcaggggcgacgcgcagtgggcgcgggcgtaagcaggaacaggacgtggcgtgggcggcaggcaggggcagtacggaacgggagcggtgctggtcgtgctgctggtgtggttggcaatgccgtggccgctgtcggcggccgtagccgaagccgggcgtgactacctgctggtcggtgcggcgaccgatgaacccaccccgcatcgcgcatgcacgccggagatgctggcggggccacggcaacaggtgcaggtgtccgcgccagcgggcggctggtcgggccagccgcaggcactggacgtgttcaatgtgttcgcgggcgaagtccgcgtgcagcatggggatcgcgaaatctgcggcaacatgcacgatgcccgtacccgtgattcccggttccgcgcaggcatcggcctggtcgcggtgccgccggcgggcagccatgaaccgttcctggtgtcatggcagacgccgctgaaggcgcgctgggtaccgaccctgcggctgggcgcgcccagtcccgtgcagcagaacgataccgcccgcctgctggtgcgcgcggcctgcatcgccgtggcaatcgcactggcgttgtcggccctgatggccttccttaccacccgcgaccgcagtttcctggtctacatcgccggtaccaccgtgctggtgctgtggcaggccattctcggcgggctgagcggctaccccgagccatggctgccggtgggtgagcgcagcgcgtggtggctgctgtcgttgaccgctgcatcccaggcgctggtgctgcccgcgttgtggcgactgaacggcggcgaccgcctgctgccgcgatcgcgcccggtgcagctgctggcgctgtggggattgctggcgctggccgcgtgggtgccctggctgcagcgggacagcctggcctgggtggcgcagggcctgcaggtgtcctacctgctgggctgcggcctggcattgatggccggggtgtgggcatggctgcgcggcgaccgctgggcgcaggcggggttggcggcgctggcaccgatgctggtgttgatcctggccgacgcctgccgcgctgcgtggttgctggagtaccgcgtggaggcactgcaactgtcggtgacctggctgctgatgatggctgcctatgcgctgaaccagcggctgggccgcctgcgccagcagcgcgatgaacttcgccagctggccgagaccgatggcctgaccgggctgcccaaccgccgtgccgggctgcagcagctggcacggcacctggaacgggtcgatcgcgagcgcggcccgctggtgatcggtttcctcgatatcgacctgttcaaggacatcaatgaccgccatggccacgccgtgggtgaccaggtactggtggcggtggcacgtgcattgcgtgccgcggtccgcagccaggaccaggtggtgcggatgggtggcgaagagttcctgctgctgatgccgggcatgccgcgcgaggcggcatcggcgcgcctggatcgcctgcgccagcacctcaccgaggcggcccgggcgctgcaggtgcccggcctggaggtcaccgccagcatcggcctggcgcagtggcggccgggcgaggacgatctcgccgcgctgctgcgccgggccgaccacgccatgtacgtggccaagcgtgccggccgcaaccgggtattcgacggcgaagaactcgatccgccgcccccggcatgaagcgcagcgggcggggatgccggataatagggcgatgaccacccgactcaacaaacatatcgccgacaccggcttctgctcccgccgcgaggccgatcgcctgatcgccgcccgccgggtcaccgtcaacggccatccggccggcaccggcgcggtggtgggcgaggaagaccaggtgctggtcgacggccagccgctgcgcgcgcgcgtggcccgcaagcccggtgcccgccgccatgtctacatcgcgctgaacaagccggtcggcgtcacctgcacgaccgagacctcggtcaagggcaacatcgtcgacttcgtcggccatgaacagcgcatcttcccgatcggccgcctggacaaggagtccgaaggcctgatcctgatgaccagcaacggcgacatcgtcaaccagatcctgcgcgccgagaatggccaccagaaggagtacctggtggcggtgaacaagccggtcaccgacgagttcctgcgtggcatggcccgtggcgttcgcatccacgaccagatgacgctgccgtgcaagacctcgcgcatcgccaagttcggtttccgcatcaccctgcagcagggcctgaaccgacagatccgcctgatggcggccgagttcggctatcgggtgacccagttgcgtcgcgtgcgcatcgacaacatcaagatcggtgcgctgaagccgggccagtggcgcaacctgaccgagcaggagctgcagggcctgctgccgaggcagctggactggtaaacggcttctgtagagccgagcccgtgctcggctgctcttttgtccgggtgcagccgagcatgggctcggctctacatcagctagacttcgcggtgacctgccggaacgtgacgctgcatgatcaagcccgacaagcctgccaatgaagcccttcggcttgaggcgctgtaccgctaccgtatcctcgattcggagcgtgaaaaatccttcgacgacctggtggtgatcgccaaggcggtctgcggcacctcgatggcggcggtgaccctgatcgacgtcgagcggcaatggttcaagtcgatccagggcatcgatgcggcagaaaacctgcgcagcgaatcgatgtgcggccacgcgatcctgcaaccgcagcaggtcatggtggtcgaggacgcgctgcaggacatccgcttccacgacaatccggtggtggtgggcgatccgcacatccgcttctatgcgggcgcgccgctgatcagctccgatggcctgccgctgggcacgctgtgcgtattcgatgcgcagccacagcacctggccagcgacaaggctgaagcgctggcggcgctgtcgcggcaggtgatgctggtgatggaactgcgccgcttcgcgctcgacatccagaaacacatgctggagcgcgatgactacgagcgactgctgtctgagtaccaggacgtactgctcgcgcagaatgccgacctggccgaacagagccgcaccgacgcgttgaccggcctgccgaaccgccgtgcgatggcggcagcgctggaagaggcggtggcggtgaacggagaccagcccggggtggcctgcgtcgcgctgctggacatcgaccatttcaagcacatcaatgatttccagggtcacgccaccggtgaccgcgtgctggccgaactgggcgtgctgctgcgttcgcatttcgccggtcgcggcatggccgcgcgctatggcggcgaggaattcgtggcggtgatgccggctaccgacctgcgcaccgccgaactgcagtgcgagttcctgcgcctggccgtggctgatctgccgctgggattcccggtcacgatcagtattggagtggcccagcaccagcccggtgaaagcgtggatgacacgctggcacgtgccgacaaggcgctgtaccgggccaagggcaatggccgcaaccgggtggaagtggccggctgaagcatctgccacccgcgcggtaaacggatgccgctccagtagatcaacgcgacgcgtggatgctgtcaccgattcacatcgcgtcgcagctcctgcgatcagaaccgggcagcatgatcccctggttccccggacgccgaccatgctgcagaccctggccatcgcccactatcgttcgctgcacgggctcgtactgccgttgcagcagttgaatgtggtgaccggtgacaacggcagtggcaagtccagcctgtaccgtgccctgcgcctgctggcagagaccgcgcagggcggcgtcgcggcggtgctggcccgcgaaggcgggctgggctcggcgctgtgggcgggtccggaaaagatggaccgtcgggttgctgccggcgaaatccccctgcagggcggcccacgccaggaatcggtgggattgaagctgggcttcgccactgacgaattcggctacgccatcgatctgggctacccgccgcccagtcgatcggccttcgcactggacccgcagatcaaggccgaggcgatctgggccggcccgttcctgcgcagcgccaacctgctggtcgatcgtcgcggggcgatggtgcggcagcgccatgcgcgcggctgggatctcgtggatgaccggttgtcgctgttcgacagcctgttcacccaggtcggcgatccgcagcgcctgccggaaaccatcgcccttcgcgagtacatccggcgttggcgcttctacgatcatttccgcagtgatgccgatgccccggcgcggcaaccggcgatggccacgcgcacgccggtgctccatcacgacggccgggatctggcggcggcctgggtcaccatcctcgagatcggtgacccggtggcgttggcacgcagcgtcgacgatgcgttcccgggcgccacggtcggcttcgaggagctggatggacgcttggcgctgcgtttccaccagcctgggctgctgcggcccttgtcgatggccgaactgtccgacggcacgctgcgcttcctgctgctggccgctgcgctgcacacgccgcgtccaccgccgctgctggtgctcaacgagccggagaccagcctgcatccggacctgctgccggcgctggcgcggctgatcatcgcagccagtgcgcgcagccaggtatgggtggtgtcgcacgccagccggctgatcgcggcgctggaacaggcgccagggtgccattcgctgcatctgtacaaggaacagggccgcacgctgttgagcgggcagggcctgctggatgcgccggcctggcattggccgcagcgttgatgcggccatccacgccatgcgtggatgcactcaatcggcgatgttgcgcgcctcggccgtgccaagaatctccggatgctgcaccggcttgcggcggttcagcagcggatgcaggaacacggcgcctacgatgatcgccacgccgaggtagaaccacggggtgacttcgtgctgctcgcgcagcagcaccaccgccagcaccaccgcatagaccggctccaggttggtcaccagctgcaccgtgtaggcgctcaggtggcgcagtgcgaccagggccagggcaaacggcagcagcgtgcagaacccggccagcaccagcagcaggatgccgtcgtgcaggtccgggaccacccacaacgggctggccagcgcaggcagcaggtagggcatcagcggcgccagcagggtcagggtgagggtgcccgcacccagctccagcgcggtgaccgtgagcggatcggcgtggctgaccatgcgcttgttgagcgagccgaacactgccaccagcagcgccgagatcgcgccgatcagcacacccaggcgcatgccgtcgggcacgccaccgaccaccagcgcgacacccggcagcaccgccaggccgaacgccagttcacgcagctggaatggccgcttggccacccacggttcgatgatcgaggtgaacaccggcgccagcgcgatgcaggtggcggccaccgacgcattggccagctttaccgcaccgtagaacgtcagccagtgcagggcgaccagggcgccgatgccggcataaccggccaccagccgcactggcagcgtacgcagtccacgccagacccgcggcagcagcgccagcatcgccgtcaccagcagcatgcgccaccacaccagcggcagtgcgggcagggtgatcagcttgccgaggatggcggtgacgccccacagcaggacacagaagtgaatctgccacaacgctttgcgggtgtcgggtgtgctcatccgcctattgtgcggcaatcgcacggccgccggcgatgcctgtggcatgctcgcggaaactcgccaggggaaccccgcaatggctgccaaccgttccgcccagcgtgcatgggcagcgctgactgcactgatggcggccacctcgttgctgctgcaatacctgttgctgctgcatggccccggggcggctgccggggtcggcatggcgacgctgcgcttcgttggttacttcacgattctcagcaacctggcggtgtgcctgggatgcgtccggctgatccgtgcgggtgtgctgaacgcgactgtcgccgcggcgatcgcgttgtgcatcggggtgaccgcgtgcatctacgtgctggcgttgcaggggctgtggcaacccaccgggctgcaatggtgggtcgatgccggcctgcactacgctgtgccggcgctgtacctgctggggtggtggtggctgctgccgcatggcgcgctgcgctggcgcgcactgggcggggtgctgctggtaccgctggtgtacctgggctgggcgatgctggtcgccgaagtgacaggacaggcgccgtatccgttcctcgaactggaacgcctggggctggcggcgttcctgctcaacgtgctgcgcgttgcgagcgtgttcgtggtggggtggaccctgctgtgggggctggaccgctggcgctgtcgatgaggcgctgcagggccatcgctgccgccgggttgcgcgctttgcctgcgccgatgcacagcaggtagacctcgcgcggggcctccgcggcggacccggccaggcagggcaggtcatccactggttcaccgcgtgaccagcggcgtgcgcgttcggcccagcgttgctgcacgggcgccggcaggccctcgttcaagcgggcctggctgcgcttgatccgcgcatagacgaagccggcactgacatcaccgtgcaatggcgcctcgtcgctgtcctcgatcaccagcgccacgccatggcggcgggcggcgtcgaccagtgccgggccatgtgcctcggcgttgcggacctccagcgcatgctgcagcggcaccccgtccagctgcttaggcagctgtgccatcagcgcctccagtgcatcggcgtcggccgggtggcgcggatcgaactgccacagcaatgggccgagccggtcacctagcgccagtgccgcctgcaggaacggtgtggccgcttccacggtgctggacaggtcgcgtcgctgcaccaggtagcgcggcgccttcatcgagaagcggaaaccgtcgggtgtctgcgcagcccattgcgcgcactgggccgcagttggcgtgcggtagaacgtgccgttgatctcgatgcagcgcagggcgcggctggcgtgggccagttcttcccgctgcggcaggcctgctggatagaacacaccgccgcgccattcgggaaacacccagccgccgatgccgcagcggatctctgcctgccggccggccgtggtcactggccgtgatccgtgcgccacgggtcgtagctgccgaaccaccacaggtagccttccgggtcggcgcaggcgtagccgcgtccgccatagtcctgatcggcgatgtcgatgacgatgcgggcaccggcggccttggcccgcgcgtagtgcgcatcggcatcggtgacgatcacgcaggcgctctgggtctggcgtccgccgacctcgtcaggcagggcagcgtgtttgctccacgcactctggttgctggccgagcccagcatgatcatgccgctgccgaaggtgagctgcgcatggaagaccgtatcgccatcggcgtagacggcctgggcatggaagccgaaggcgcgctgcagccagtcgatggcggcctgcgcgtcgcgatagcgcaggcacggaatgatcgtggagccgctgctgggttggccgttctcgcccatgacacccctcctatggcacagggcaggatgcgccgccggacgttaccatcccgcgaaaccccggtgacggcctgcacatggccgccacccctgttcggagatcgtgctggatgaaaccctggatcggaggagccgtgctgctggcgtgcacgaccatggcgagcgcggcgaccccgccgccgctgcaggacctggatgcgaccgtcgagcgcgtgcgcgcgcagttcgacgtgcccggcattgccgtagcagtggtcaaggatggcgaggtggtgctggagcgcggctggggcgtgcgcgagcagggcaagccggaaccggtgcaggccgatacgctgtttgccattgcgtccaacaccaaggcgttcacggccacctcgctgaacctgctggcggaagagggcaagttgaagatggacgacaaggtgatcgaccacctgccgtcgttccgcatgtccgacccgttcgtgaccgggcagatgacgatccgcgacctgctgtcacatcgcagcggcctgagcctgggcgccggtgacctgctgttctggccaaccacgtcctacagcaacgccgaagtggtgcagcggctgggcaaggtgccgctgaagggcggcttccgcgaaagctatgcctacgacaacatcctgtacgcggtcgcccagcaggtgatcgagcacgtctcgggcgtgagctaccagcagttcctgcagacccgcatcttcgacaaggtgggcatggccggcacgcgctacaacgccgaccacctgaagccaggtgacacggcggcggtcggccacgccaagtacgatttcaaggacctgcgcaccgtcgcaccgctgacctggtcgaacaatgccggcgccggtggcatttattccagtgcgcacgacatggcgcgctggatgcaggtgcagctggccgaaggcaagctggccgacggcactgcgctgttcagcgaaaagagccagcagcagatgtggcggatgatcaccccgcagtcgatcccggcgccgagcgtgccggagctggcaccggcacgggccaactttgccggctatggcgaaggctggagcctgagtgactatcgcggccggaaactggtctggcacaccggtggctggccgggcatggtctcgcgcttgaccctggtgccgggcgagaagctgggcgtggtggtgctgaccaaccaggaagtgggcgcggcgttcaacgcgatcaccctgagcgtgcttgatgcctatctgggcggcgacaagcacgactgggtggacgcctatgccaaggccgtggccaagggccaggacaaggccgacgaggcctgggccaagcatcagagcgcgcgcgacaagggcagcaggccgtcgctgccgctggccggctacaccggcacgttccgcgaccgctggtatggcgacatgcaggtcagtgccgcaggcaagggcctgcgcctgcgcttcatgaagaccgcgcagctgagcggccgcctggagcactggcagcacgacaccttcatcgtgcgctgggatgaccgctcgctcaacgccgatgcgttcgtgaacttcagcctggacccggacggcaaggtgcgcgaggtgcgcatgcagtcgatctccgacctgaccgatttcagcttcgatttccaggacctgctgttcaccccggtcaacgaatgaaggtagtgccggccgctggccggcaacctcatgatcttccgaaatgccgcgagggtgccggccagcggccggcactaccggagcggcggcgatcatcggctggcgtacacatccggcgtgggatacttcgccgcttgcaagaggcgagggagtgcgatgttccgttggtttgaatccctgatcccggtgttcccgcccgtggatgggcgcatgccaccgcgcaaggtgctgccgttctacctgcactacctgcgcccggtgtggccggtgctgctggcgaccctgatcgccggcctgctgctggcgctggtggaagtggcgatgttcgattacctgggccgcatcgtcgacatggtcgccgagcaaccgggggccgatttcttcaagcgccatgccaatgaactgggctggatgctgttcatcacggtcatcgcgcggccgatcctggtcggccttcacaacctgctggtcaaccaggcgatcgtgcccggcctgagcaaccgctcgcgctggctgatgcacaactacgtggtgcggcagagcctgagcttcttccagaatgacttcgccggcagcgtcgccaaccgggtgatgcagaccggtacctcgctgcgcgagtcggcggtgcagatggtcgactcgctctggtacatcgtggtctacaccggcaccgcgctgtacctgttcgcgcaggcggactggcggctgatggtgccgctgatcctgtggctgctggcctatgcggtgatcatggtctacttcgtgccgcgcgcgaaggaacgggcctggattgcgtccgaagcgcgttccaaggcgatgggccgcatcgtcgatggctacaccaacattcccacgttgaagctgttcgcccatggcgggcgcgagcaggcctatgtggccgaatcgatccaggaactggcggtcaagcaccgcgcgcagacccgggtgaccaccggcatggacctgaccatcgccatcgtcaacggtttcctgattgccggtacctgcgggctcgcgctgtggttgtggaatggcggccacatcaccgtcggcgcgatcacgctggcgaccggcctggtgatccgcatccacaacatgtccggctggatcatgtggaccatcaatggcatcttcgaggacatcggtacggtgcaggacggcatcaccaccatcgcccagccgctgaccgtgcaggaccgcgaggacgcggtgccgttgcaggtgacccgcggtggcgtgcacttccaggacatccacttccactacggcaagaagggcggcgtgatcgcaggcctggacctggtggtgaagccgggcgagaagatcggcctggtgggtccttccggtgccggcaagtcgaccctggtcaacgtgctgctgcgcctgtacgacctggaaagcggccgcatcctgatcgacgaccaggacattgcctacgtcactcaggaaagcctgcgccagcagatcggcgtggtcacccaggacacctcgctgctgcatcgctcgatccgcgacaacctgctgtacggtcgtccggacgcaaccgatgagcagttgcgcgctgcggtggccaaggcgcgtgccgaagccttcatcgacacgctggtggatgggcaggggcgtcgtggttacgacgcacatgtcggcgagcgtggcgtgaagctgtcaggtggccagcgccagcgcatcgccattgcccgcgtgctgctgaaggatgccccgatcctggtgctggacgaagcgacctcggcgctagactcggaagtggaagcggcgatccaggacagcctggatgagctgatgggcggcaagacggtgatcgcgatcgcgcaccggctgtcgaccatcgcacgcatggaccggctggtggtgatggaccagggccgcatcgtcgagaccggcagccacgccgaactgatcgccgccggtggcctgtacgcgcgcttgtgggcgcgacagaccgggggattcgtggctgcggagcagtaatccccaggggtgtgtatcgcgacgtgtcacagtccacttccatgggtctggccgaacatcagttcacgctggtcggatagcttggaaatggctgatcgccagcgattgctccagcatcggaagtgtatccttcttccataagcgctgcggccatgccttttgaatggagaaggtcctccaatggcagggtggtgaaaacgatgttgtggcgggaagtggtagagcgaagcgcttcgagccagtgagttcggctctcgacatcaaggttcaggttcatcgtgttggcgattgcatcattggttaggcggacccaacaccgagagggtgatgatggagcgtgcagaagtacgtctgcttcaatgtctccgtccgcccatgcacgaccgatttcgtcgacccgatcgagccaaggctgcaggcttgaagtggcatctacgaaacacctgcggtcgagcgcaggatcaatgtggaaacgttgaatcgtctgtttggcggcctttacaggcacagagaagcgagcatcgacaataggcttccggtgccttcgggctgcctgaaggatagccttggaaagatggctgtcggtcctgatttcgctggtcctcagtgcggtgtcatgagccttccaggccgcgtacatcgggcgcattctctcaatgctggcgtcgcgcagatggtagcgatgcttgagctcgttccatctcgcatactcggcgcccgtaagtgcgtcacgcagcgttctgtcgccatcgaggaacttgagtttgcggatggagggccacagcaagaggccgccaaaaaatccgccatcgtgttcgattgtcacccctggcgagcttagaaccacgtcggatgctgaaattgcggcctccacgctgcgggtatctatgaataggcccttcctgagaggttgaaccgtgcccaggaccagcacggttgaatatcccttcgtgaacttccagatgcgtggccctggcctcggaggggtcgcatggacggtgcgaaggggagtaatgctgggctcttcttgatctctggcgtatccatcggcggaagaaagcgcaatgagaataaggcctatcaagccgattgacgaggtgcgtagtccacccatgttcaatccaggcatgctgtgaacatggggcgcggatgggttcgctggtctttcgaaaacatgttccatgccgcatcaactgtgtcggggtgaaagtgcgggaacctcgatctctgcaggagatgctgtcggatgtactgccaatagatgatctgaggacccatctcgcgttccagaaagcggaaaatctccaatgtggtccagtagtcagaaacgtctgatggaaccggcgctggcgtgtggctcggattgatcaggtccccgagaacagcggttgcctgaaaatcgtggtcaacgagggatacgaccggcaggatgcaactcccggttcttcgcgccatagcggcggtgcctagcatgacgtccaggcggcggccaagaaatggaatgcaaaaggcttcttcgcgcaggcggtgaacgtcgggcatcatgatgacagctgccccgttcttcagggcgcgaagtgctgtggcgattccttttgcattcgagtggacaatgccagcgcgacatccggcgcgatcgaacagtcgtcgatagagatcgtcgaatagctcgttgccggagtggttagttggatcaccgtagaagatgtgaacatcacgatggtggcgaatgctctccatcaggcggatggcagacaggatgtagtggccatgatgcggaagggcgatcacaactcctctgtcgctcgggagtcttgcattgattgacgaatagtcggagcgatcaatgcaacggatgccttcgagaagtgaatggcggtcaagctgtgccagttgggagctgatggtgcttttctgttgataccatcgatagtatgagtccagatcgagtccgctcattctgcatgccgagtggatagcgaccctttcactgtcggagagatgcaggccaagctgctgctctgtctggatatcgtgtcgaatggtcgccatcggggcgtactgattaatctcacaggcctggctgttgcgcatcgccgggttcctttcgtgattccgatgcacggtaaaaactcttcagttctccgtggatctggtcaaatttcatgggattgaagtctggatgcttccagtacatgtgcatcatggccgagtggaaaacgcgctggcggattctgctttcggaaagtcgtgtgcccggccgccgctggatctgtgctgcttctgcgagccagttgctgcctattcggcgattggcatccagatggtccgaaaggacgcgcagcacggaaacaagaggggagtcgggaggcaacgatattgcgccttcatgcgtgcatgcaatgaggcgaaatccgtgaaggttgttcagaatcgcctcgaccaaggataggaaacgctgctcacctcggcgtgatgtcaggacaggcgcgtcaacgctggatgtaagttggtcgctgaacacaacgatgatgtggcgtcccggtttgcgctccagcttgtgaagagcctcggatggcgctatcgagtatgccgagtcagcaccaatgatcccggtgaccattcctctgtttgataggtcaatggcacggtcgatgctggaacgggtcgtcgccacaatgatggcggtcgacgatgtgctatccgttgggtacgggaatatcgcatcacatgggatatcgggctgctggggtgttgatgctctggtgctcattttgtttcagctgcgtgtgatctcgagcctgaatccggcaggttgggttgatggcacacgtacgagccgtgtgccatcaccttccttatcgcggatcttcgtaattgttggacccgcagcagtcgctgctgaatgccgcaactttgatgtcatcaacttcggcttcaaagatggtatccagcgcgtttgcgtttgcgctggagaatttcatccacgttgcgacggttttcggatctgagagggtggtggatacattcatgacgtagtccctttgtcgaagataggtagaagaccgggagctatttctcggtcggcatcaagaatgtgccgtgcgcgtggcgcttggctgtcggtaaccgcagtcctgtgtcgtaggaatttcactcggaacttcgtgtgggccgagcagatgatctgctgctcgacgtttcgaatccgttgattgatcaatgccaggggccgatctggacagcggttgaagtcggaacagttcggctctcttgaagctgccggtcggcggcgcggcaggtctgctggcaatcgccgtggaggtgcacaatgcagagatgcatccgcaggggctgcgatacgcttctcaccggagcagtggataatgcaggctcatccgttccaggtcaccgcaatgaatttctgccgattgcgtcgtctaccgttggtgatgatgctggtcgtagctgcgccgtgcatggcagcgagtggagcggcggatggtgtaggtaatgaccagctcgagcaggtcgtcctgctcagccgccacaacctgcgcgcgccggtggtggcgtcgggcgccctggcccatgccacgccggagcgctggccacgctgggacgtaggccccggcgagctgaccaccaagggcggcgtgctggaagtctacatggggcgctacatcggccagtggctgcgccaggcgcagttgttgccggcgtcgggttgcccgcagccggctgacttccgcgcccatgccaacagcctgcagcgtacccaggccaccgcgcagttcttcattgccggtgcgtttccgggctgccatgttgcggtcgaacagcgcatggcgctggggacgatggatccgctgttcgacccggtgatccacaaccatgacgcggcattccgcaagcgcgcgctggcggcaatgcagcaggcgctgacagcatcggatctggcacccgcactgtccgtggtggaggaaatcacccgttacccgcagtcggcggcctgtacggggcgcagcgactgtcatctggtgctgggcgacacgaccttcaatgcggagccgggcaaggagccacgcgcttcgggttcactggcactggccagcggtctggtcgatgccctgctgatggagcattaccagggaagtggcgttccgcgcgaaggttggggccgcttgaacacggaaggccaatggctggcgttggcgcagatccgcaaccgctaccaggacatcctgttcggaacacccgcggtggcgcgtgacgtggccgctccgctgttggcgcgcgtggatgcgtcgttcggtgatccggcgtcgccgaaggtgatcctgctggtcggccatgattccaatatcggttcggtgctggcggcgataggaatcggtgactacagcctgccaggccagttcgagaagacgccgatcggtggcctgctgcagttcgagcgttggcgtgaccgccagggcggtggcgagcgtttccgcctggcctacgtctatccgaccaccgcgcagctgcgcgatgccgtgccgctgaccgaggcgcagccgccgggacgcgtcgcactgcccttgccgggctgtgaccggcagggctgcagccgtgcgcagttccagcagctgctacagcgggcccgtcgctgaaacagggggctatcgcggcggcgtgcgcacgatgccctgcgcagccatcaacgtaaggtcgccgcccagccgtggggaacggaacggtccgcgtgcatgcgcggcatcgaacaggccgccatcgggtgagcgcaagcggtagaactcgacccagccgctggcctgcaggggcagctgtgcaacgccggtgtgttcgttgaaccatgcagggtccttgctgccttcgatgacgcggcgggcaaggcggtcaatggcgcgatccctgctggcataccagtcctggccgcgcagccgagccagctcggccatcatcaccagcggcgccaatgcgtagtcgtggtagtgcagggcgcgttgcccgcgcgccatctccagcggcaggctgccatcgtcctggatgtcatcgacgcccttctggaaggcggcgtggccggcttgccacagggcatcgtcgtcggtggccagtccggtggccagcacgcccagaccgccccagtagtagtggttgttgcggcgccgtttcggattgttccagtacgccaggttggcccgggccagcctctgcaaccacggatcgatgcgcgcgcgctgccgggcatctgcctggtcgtgcaccttcaggtaggccatcgctaccgcatcgagcatccactgccgcatgtagaacgactggttgttgttgacccggatcatctgcccgagcatggcgccgtcgtcggcccacgcacccagccaggccagggtgcattgcgccgccgcccggtcaccggtgcgcaggtagtcatcgctcatgcgcgccacgtcggcggcatagcggtccagcggcgcggtggcgtccttgttctgctggtgcagtaccgggtcgatcaccgaaccggccttgtcggtgtagtagcccagggcacggatgtcgggctgtccagccggtggcggcgggcaggcagcgtaggcaggagtgctggccaacagcgcgggcagcagcgcaagacgcaagagggggagagacatggacgccggcggaagggggaacctggcgaaagatgcgcccggagttgttcgccaggtgtgaggtcacgcacgcccgatgtgcaacggttcaggaccggagcggctccagcgtggcgggaaggatgcgttgccctgtaggcgacgcgtgcccttctgggctgcggggttgcgatgtagtctgcgggtgattcacctactctggagatcgaccatgaaaatcacggactttctggtaatggatcactatggcgaccagatcgacgccgatccccatggcaacaacattgcattctgctgtttcgactgcgggcatcccatactggccgtcgcgctggagaaccaacgtgggtttgatgaagtgcatccggcggcatgccggggctgcaaggtgaagtactttcttgatatccgcagcaatgccgggaagctgtacatacaccggatgtgaggccgtcgggcgcttcaaacgagaacggcccgggaagcccgggccgtgaggtgctgccagagccgcggggcattcagccccgcagccgatcactcgatcggctggtccagcatcagctggcgtgcgaaacgcaccggcggtgcgccgtaggacagtacctggtcgtggtacgccttcaggttgaacttgtcgcccagcttttcctgcaccgccttgcgggtgtcgaagtgttcctgcgcacccacgaagtaggtcggcagctgcgccgaggtcagctgcgcgcgcacccacttgccggccgcttcgctttcctgctggaacgcgtcgtgggtcatcaggtgcatcgccttctcgcgatcccagttgtccacgtgcacgccctggtcgaggatcgcgttggagatcgtgcgcaggtagaacttcagctgcaccaggtggaacagcgggtcgttgtcgaggtagccctgctcctgcatcatgcgctcggtgtagaccgcccagccttcggcgaacaggcccgaacgcagcaccgcacgcagggtggaggggaacttggccgagtgccagccttccaggtaatggcccggggtgccttcgtggatgctcagcaggtggatcatgcgcgagttgtattcacgcaggaacgagtcgacctgcttctcgttccagtcgtccggaatcggcgacacggcgtagaaggtcttcaggttcttgtccagcgggcccggagaatcgcagtaggccacggccacgccacgctggaattccggcatcaggatgatgtccaccggcgcatcgggcagggtcaccaggtcgtgctcgcgcacgaacgcggtggactgctccagcgcggccttggcatcatcgaccaccttgtcgcgcgccggcttgtcggcgtaggccagttccagtgcggcctcgatcgccttctgctgctgctcgtcggtcggctgggccggcatctccggcgcacccggcttgtccttcagtacgatctgcgcgatgccgtacatgtcctcgcgcacgcgcttgagttcggcgcgtgcacgctcaccgatctcctggcgcgacagcgaggagctcagcgcgaacttcagcttctggtcgtacttttccgcaccaatgcggaagtcgcccttggcgttcggcaccagggtcttgtccagccaggtctgctgctcgtccacggccttcttcaggccgtcgatggcggcctgcaggcgctgctggtcggcctgcggcagttcgccgatgtgcggggtgatgaaggtatcgacgatgctgaggatgcccttgttctgcttggccaccgtctcggcatggatcttcggaacgcgggccggatccaggttctcgcgtgcctgggcgaagatcgccggcagcttttccatgcgcgcggtcgccgacttcaggcgttccggcagcggcgcgaactcccgggccatcaggccatagatcgcgctgccggcgatgccgttgtacagctgcgggtcccacttgccggactggagcacttcggcgttccagatttccgactgcagctggttgcgcaggatcgccgcgtccacctggttctcgcggcccagcttggccacctcgatcttgtccagctcgcccagcagcgccttgtaggcggccacggtcttctgctggccggcggcgctcaggtcgtccagttcgctgtcgtagcggtggtcaccgatctgggtggcgctgaccggcgacagctgcatccaggtgtccagggcgcgcttggacagatcggcgaaggcggcatcgaccgccgcgtcaccggcctgctggctggtggccggggtggaagcgttggtcggggcgtcggcaggctggcaaccggccagcgcagcgaccagggcgagggcaagaagatgcgggcgcatcggcattcctgtacggggtcaaaccctgagcatagggccccgtcgctgctttgtccccgtgccataggattaccatgggcggtttcaaggaccctccaaaggagcgcaggacatggaataccagggaagctgccattgcggcaggatcgcattcaccgtacaggccgaggcgccgatcagcgacgtcatcgactgcaactgctcgatgtgccgccgtcgcggcagcctgctgtggttcgccccgcgcgaggcgttccagctggccaccgatccggctgacgtggccacctaccacttcaacaaggcgcatatcgaccaccaccactgccgccaatgcggtatcgccccctacagcgaagcgatcgatccgcgtaccggcacaccgatggtggcggtgaacgttcgctgcgtgccgcaggtcgatctggccggtctttcggtgacctcctacaacggagccgcgctgtgaggccgctgtgcgcgtggacgcgcacgctggcagtgccggtgctgctgttggcactggcagcctgcgccaagaacggtgagcgcgctgcagaggcgggcgcgaccgcggccgatgccgctattgcttcgccggaaggcgcattcctggcctacgaacatgacgtgcaggtgcagctggaggcggcgcagatcgcaccgcgcatccagcagatcgcccaggcctgccagagcgcgaagttcggcgactgtgcagtgttgcaggtcgaccagcgcggcggcgagcagcccagcggtgaagtgaaggtgcgcatcgcgccgaagggcaccgagccgctgatcgcgatggccggtgagggcggcacgctgcagtcgcgcaacacgcgcgcggaggacctcgcgcaggaagtagcggacaccgcgctgaccaagtcccggctggagaaggaacacgcgcggctgttgtcctaccaggaccgcaaggacctgaagatcgaggacctgatggcgatcaccacgcggctgtcggagatcgaagcaggcgtcgagcaggccaacaaggatgccgcacagcagcgtcggcgcatcgatacccagctggtgacgatccacttcgacaccacctcgggccagcgcagccgcagcgagatcggcgaggcgctgagcgagtcgggcagcatcctcagcggcagcattgcgttcctgatccgcgccgtcgccgcgttgctgccggtgggtgtgctggccctggtcgtggcctggggtgtgcgggcgtggtggcgtcgccgccgtcgcacgctgccgcccacccgctgaggtgacggctgatgccggcagggagccggcgtcagccctcgtcggtctcgtactcgacgaacacatccagctccagcgccagttcctgcaccgcgtcgcgcaccttctgcgcggtgctttcattgccgacttccacttccagctcgtggatgcccgggccgatgtcatcggacagccccgccgaactggaatcgtcgtcgtccatgtgcggcatcaggtcgtcggtttcctcgacatgttcgatgccctccaggccgagcagcaggtcgctgatggcgcgggcgtcgtcttcggttccggtgatgcgcagtcgcagcatggccatggcgtaggtacgttgtggagttgcctgcagcctagccagcgccgggcaaagaacgggtgagggcgcagtcaggcgcgtgtggccgggcgtccgagcaggctgtccggcaatgcgggaatcggcgtgcgttcgtcctgcgcctgctccagcaaccagtcgatgaacaggcgtgcggccgggctcggcggttgtccttcggcatgcaccacgtgatacgcatagcgcgccttcagcgccgggccgggcaggcgtaccacctcgtagcgctgcaggtagggctgcgcgatgtgggtacgtgccagcaccgcgcccatgccgtacaccgctgcacgcatcgcatcggtgctgtcggcgaaggtgtgcatcggcggcagcggcgagggcgggcgcacgccggcatgacggaaccagtcgcgccagccctgcggcgacaggtcggtcagcagcggcaggtcggcgatgcgcgccggatcgaccagtgcttcgaccccggccagcgccggcgaggccaccgggaacaggtagtcgtccatcaggtgctgcgcacgcaggcccggccactggcccagaccgtagcggatgccgacttccggcccattgtcgtcgtagcgatccaggccgctgccggtgtgcagctcgatgcggatgtgcggatgggcctgggtgaagcgcggcagccgtggcagcagccagcagtaggagagcgagcgcagcgtggtgatccgcaacggcacgctgtcggcatccggctgcaggtgatgggcgacggccgcgacatcggtgaaggcggcgctggcggcgtcggccagttgccggccctcggcggtcaggcgcacgccgcgggcgtggcgcaggaacaggcgtacttccagcacttcttccagccggcgcacatggtggctgaccgcgctggcggtcaggtgcagctcctgcgcggcctgggcgaagttctggtggcgcgcggcgaccgcgaacacggccagtgcggggagcagggaagggcgtagctgcatgtcgagcctcaagccatatttgtggctggcagcgatactacgcgcttgtgcggcaggcgtctgcgcccgatcctgtctgccttgacgaggaattgacgatggacggaggcgaggcatgaatgcggtcccacaggcagccgagcgcgactggcgcacaccgctggagttgaccctgctgggcgccatctggggctgctcgttcctgttcatgcgggtggcggtgccgtcgttcggcccgttcgcgctggtcgaggtgcggctggtgctgggcgcgctggtgctgctgccgttcctgtggcgtgcccgcgcgcagttcccaccgcggcgctggctgtggctggcaccgatcgggctgatcaactcggcgctgccgttcgtgctgtttgcctacgcggccgagcgagcccctgcggcgatcggcgccatctgcaatgcgatgaccgtgctgtttgccgcgctgatcgccttcctgttcttcggcgagaagatcggcatgcgccgcgcgggcgcgttgctggtcggcttcgccggcgtggtggtactggccacggccaaggtctcgggcctgagcatcggcactgcagtgctggctggtgcggcggcttcgttgctgtacggcctgggcgtgaacctggtgaagcggcacatgaccggcctgccttcggcggcggccgctgctgcaacgctgtcgtgtgcctcgctgtggatgttgccgatggcggtgacccactggccgcaggcggcgattccgctgaaggcgtggggcgcggcgattgccttgggcgtggcctgcaccgggctggcgttcctgatgttctaccgcctgatcggtcgtatcggcccgtcgcgggcgtcgacggtgacctacctgattccgctgttcggcgcggcgtttgcgtggttgttcctgggtgagccggtgacgttgcagatgttgattgccggtgtgttgattctggggagcgtggcggtgagtcagaagggctgagcgcgccgacgcactggtagtgccgggcgctgcccggcagctcttttccacgcctgcggagaggtgtcactttctttgctcgtgcaaagaaagtaaccaaagaaacacgccgccaggccgcgagccggtgctgcgcaccggtgccctgcgctcctcggcccgtcgagggacggcgcgggaactcgctgcgctcagacacccgcgcctcttcgccctcgccagacctgcggtgctcggctcgctcaaggcggactggaaggtcaagatcaacagtaaaagcatccacgcattgcgtggatcttctgggtgcagctgtggcgtttgaactgggtccgccttgggcgacccgagcatcgcaggggaatcaggggcgaagaggtgccgatgtcctgtagagccgactgttagtcggctgccttctgcacaccgtcccctgattcacggagaagcgcaggggaccggcgtgcgaagcacggcggctcgcgacctggcggcgcgtttcttttggttacttttctttgcgtacaaagaaaagtaacgcccatgaacagtgaagcaccttcagcacgcgtcacgcgcaggaaaccatcagcgcaccggcaccggaatattgcacagatcgatatgcccggccgggcgcttgtagaaatcatccacgcggttgcgccgcgcctccaccgtatcggcgaaggtcttcgagtcggtacgcagtacctggatcggcgtgcgctcggctgccggcacgtcgctggcgcggcggatcgacacgatcggcgtgcgcagtgtcgggtcggtgtagaagcccatcggcgccggcccgcgcggcgtcgcgctgagcagctccatgcccttcagcacgcgaccgaccagggtgatgttgcggtccagctggcgcggcgactgtccggtcaccacgtacagttcggcaccgatgctgctgtcttcctcgttgctgcggcccgcgcccagcatgccgtagcaatgtgccagccaggccttgccggcctgcgggtcctggccgaccgggaagccgtcgacaaaaccggtctgcgcggcccagccatcacggtccggcagcacgctgaccttcaggccggcgctggcgcgctcgaactcggccggcagcttgcgtgcggcactgccgaacggcttggccttggctgcgtcatcggcgtcggcatcgccgaactgcaccacgaagttgtcctgcgaacggtagatgctggtgccgtcccagaaatgctcgtgggcgaaggtctggatgttggcgacatggcgcggggcgaactgcggtgccagctcgatgatgacccgaccggccggcaggtccatgtacagcaggttggccgggtccggggtgcgccagtcgctggccgccgaggcgtcgaggatctgctgagggctgcggtagggcgtggccgcgctggccagggcgggcagcaggcaggccagggcgagggcggtcagggcaaggcaacggcggtgcggcatgggaaccccggaacatgaacgaggcttcgattctgcgcgagccgcgcagcggcgccaaccgggagagtgactaacgacacattcgctataccgaacttcgcactactgtggacttcaacgtagtggagggccggtcatgtccgaggacgatgtccacctgaagaagttccagaaggagctcagcgccggaacggtgtcgctggccctgctggcggtgctggcccgggccggggagccgctgtacggctacctcattgccaaggagctggagcgggtgggcgagggcgtgctgagcggcaagcagagcgcgctgtacccggtactgcgcaacctggagggcgccggcctgctggaaagccatgtggaaccttccagcagcgggccgccgcggcgctactaccgcatcaacgaacgtggccgcgaggtgctggcgcagtggcgccaggcctggcaggccacccgcgattccgtcgattccgtgttggagggggtaccgcaatgaacgacccgagcctggcaggccgcgccctgcctacgaccatcccgcagtacctggcgcagctgcgcgcggcgctggaaggtgccgatccggcgatggtgcaggacgcgctgtacgacgccgaggaatacctgcgctcggagctggcggcgcagcccggccgcagcgaggccgaggtgatcgccgacgttgccggcagctatggcgcgccggatgaagtggccgacatctaccgcgagaccgaagtgacggtgaaccgcgcgctgcgtacgccgcgtgcggataccgcgccggtgctgcgtgcagcggcggaagccagtggcgtcgagccggcctcaccgccgcaggcgccggtgcagcgttcgctgctggcgcgcttcttcggcgtggtgaccgatccgcacacctacggtgcgctgttctacatgctgctgtcgctggccaccggcatcttcttcttcacctgggtggtgaccggcctgtcattgtcgctgggcctgctgatcctgatcatcggcattccgctgaccgtgctgttcttcggctcggtgcgcgggctggcgctgctggaaggacggctggtggaagcgctgctgggcgagcgcatgccgcgccgcccgcgttacaccgaccgcagccgcacctggctgcagcgcatcggcgacatgttcaccgatggccgtacctggctgacgctgctgtacttcgtgctgatgctgccgctgggcgtgatctacttcaccatcgcggtgacgctgctgtcgctgtcgctgagcctgatctgggcgccggtcgcggcgatcttcagtggtgacatccccggcgtgtacatcaacgacgtgaatgtgctgccgatggcggcctcgccgctggtggcgatcgcggttgctgcggcgggcgcactgctgctggtgctgacgatgcacctggcacgcggcatcggcaagctgcatgggctgattgccaagaacctgctggtgcggttgtaacaggccaggggtcggatccctgttcgcagaacagggctctgaccccggatcccatcatgctggggtcagagccctttccgttggaaagggatccgaccccgggcggggcattaccccgccttgcgccgcaacggggtgacgttgctcttcttcttcgcggccttcgccgccggggcttcggcatgcgcggcgaagaagtcgcgcaccttcgggtacaccacctcgcgccagcgacggccgctgaagatgccgtagtggccggcaccttcgacgatgaaatgctcacggcggtccgcagtgatgccggtgcatagcgcctgcgcggcttcggtctgaccaaggccggcgatgtcgtccagctcgccttcgatgctcagcagcgcggtatcgcggatcgccgacggatcgaccttctcgccgttgaccacccactcgccacgcggcagcaggaagtcctggaacaccacgcggatggtatcgaggtagtacctggccggcatgtccagcaccgcgttgtactcgtcgtagaaacgacggtgcgcgtcggcgtcttccaggtcgcccttgaccaggtcggtgtagaaatcccagtgcgagctgaagtggcggctcgggttcatcgacaggaagccggcgtgctgcaggaagcccgggtacacgcggcggccggcacccggatagctggccggcacggtgtggatgacgttgttctcgaaccacgacagcgggttctgcgtggccaggttgttcactgcggtcgggctgcagcgcgcatcgatcgggccacccatcatcaccagcgtgcgcggcgtcggttcaccacggctggccatcagtgaaaccgcggccagcaccggtacggtcggctggcacacgctcaccacgtgcaggcgttcgacgccgaggtggcggatgaactcctggatgtaggcgatgtagtcatccagcccgaactcgccttcgctggccggcaccatgcgcgcgtcgacccagtcggtgacgtacacgcggtggtcgcgcagcagcgtgcgcacggtgtcgcgcagcagcgtggcgtggtggccggacagcggcgccaccaccagcacgaacggctggttgagcatggtgtgcaactggtcggcttcattgctgtggcgcttgaagcgcagcagcttgcagaacggcttgctcacttcctcgtgcacgacgatcggcacgcgctcgccatcgacgtcgatttcgttgatgccccactcgggcttctcgtaatccttgccgatgcggtggaagagttcattgaccgccgccaggcgatcagcaccgggcatctgcgaccaccagtggccctggttggcgaagaatctggcgttggcctgggcctggtgcacccagggggcgagcaggttgcgggtcagttcgtgcagttgatagagcatgacgaccgaatatgtatggtcatatgttgccgcgcagcatatcccatccgggtgtcccgcaggttaagtcggctgaaaataatgaatccggattcacatccgttccagcgcggccgcatcgcccgccagggcggggccgagccagcagtgcgaccctaccggctgcaggccctggcgggccagcgtgcggcggtaccagcgtgccggtcgggcctggaagccgtcgtggtcgccttcgaacgcgtcctcggcggcgaaggtctccaggaaggccacgccgccggtcagctcggccacgccggccagtcctgcacgcagctcgcggtcgggcacgtagtgcatcacgtccgaacacaccagcaggtcgaccggggcgcagggccgcagccaggcgaagtcgccgaagcgggccaggtgcaggttgcgggtcctgccgtagcggcgcacagcgtactcgctgctgtcgaagccgagatattcgaccttcggacgcagcttcagcagcggcgcgcgccaggcgccttcaccgcagccgatatccagcacgctgcggatcggccgctccaggtagtactcggcgctggccacggccaacgccaccttgcgcgccaggcgggcgctgccgccgatgtcggcacggcggtaccagcgttggaagtaggcggcgtcgtatgtcttgtccatggggcggtgcgcgatcggggaaaacggcgcctatcgtacggtgttgcggcgcgccatgcgtcgatgtgtcgcggcgggcgtgcctgcggcggcttcgccacggcatgcgagaatggccgccaacctacgccagccgccggagcgagcgcatgcagagctactactgggtcaagaccttccacatcgtgttcgtggtggcgtggatggccacggtgttctacctgccgcgcatcctggtgaacctggccgagaccgcgggccagccggcggtgaccgagcgcctgcagctgatgggcctgcgcctgtaccgcttcggccactcgatgttcggcctggcgttcctgctcggcctggtgctgtggctgggctacaaggtcatccccgatttcccgaccatggtggcgccgggagctgccggctggctgcacgccaagctggggctggtggtggtgctgctggtgtacttcggctggaccggccgcctgctcaagggcgtggccaagggccgggcgctgccgtcgtcgcgcgcgctgcgctggatcaacgagatcccgctgctggcgttcattccgatcgtgtggctggtgctggccaagccgttctgaggcggggtcacctgcgtccggtagatccacgccatgcgtggatgctgtcagggcgcaaacgaaggagccgggcaaatgcccggctctttcatttctgcaatcacctcgtgttgccggccagcggccggcactaccgggcttaggctgcttcgtacgtgccgtaactgcgcaggcgcgtgtagcgctgttccagcagctgttcggtggacagcttgtccagcgcgtccagttcgttcagcagcacggccttcaggcgcttggccatctgcgtcgggttgcggtgggcgccaccggtcggctcgcgcacgaccttgtcgaccaggcccaggctcttcaggcgcggcgcggtcaggcccagctgttcggccgcttccttggccttgcccgcgtccttccacaggatcgaggcgcagccttccggggtgatggtcgagtacaccgcgtattccagcatcacggtgcggtcgcccacacccagtgccaacgcaccgccggagccgccttcaccgatcacggtgcagatgatcggcaccttcagctcggccatctcgatcaggttgcgcgcgatcgcttcggactggccgcgcgactcggcgtcgatgcccggccaggcgccggcggtgtcgatcagggtcagcaccggcaggccgaagcgctcggccatcttcatcaggcgcagtgccttgcggtaaccctccggcttgggcatgccgaagttgcgcttgatcttttccttggtgtcgcggcccttctggtggccgatcaccattaccgcgcggccattgatgcgggccaggccgcccatgatcgccttgtcgtcggcgaaggcgcggtcaccggccagctcctggaactcatcgaacatgacgcggaggtagtcggcggtgtacgggcgcgacgggtggcgggccagctgcagcacctgccacgaggtcaggttgcggaagatctgcgcggtgcgcatgcgcagcttgtcctgcagcgcgtgcacttccgcctcgacattgaccgccggcccggcactggcgttgcgcagctcctggatcttggcttccaggtcggcgatgggttgctcgaagtcgaggtagttcggattcatcggaagccgtcgtgtaaagaaggggggaattctagccgaatgcgtgcaaaccacccgtacgccttcgtctggaaggcgacggtagcgcagccgggcagggggcgccagtcagctcagggcaccaccagggcgctgcggcccatcaactggctgcgctgggagacgaagtcgttgtaggcctcgttggcttcccggccaaggccgctgcccagggtggcagtggccgaggtgaaggccatctgcgcggcgaaatcctgcttgcgcagggccttctgttcatcggcggtggtggccttcagccagcgcgcgtagacctcgcgcaggggcgcggcgtgggcctcgaaggccggcaccagcgccggcaggctggccggggccggttccaggctgtaggccggggccacgtagccacctggctgttcgcgcttgaacgcgccgggctcgcccatgccttcttccacgtaagcgatgaagtcgggagcggtgaacaccttggccacgatctggccgccgctggaatcaacgtgggccaccaccttttccttggggaagggttcgcgcacgccgtaggtccaggtcttgtcgatgaacaggtcgtggcgcttctcgaacgggccttcgaagtcgacgccgccgagctggataccgctgttgccgacgccgaagttcttcaccttgctctcgtcggtgacgtagatctcgcgggcgatcacgtactcgctgagggtcggattgatcagcccgccacgaccgtcgacgtagacgatgaagcgcacatcaccgagcttgtcggtatgcaggcgatgctcgccgacagcgagcgagaccgggcgcgagccctgtgcggccaccggcaggtcctggccgtcgatgctcaacgccagcggcgtgtcggtcgggttgtcgatctggaactcgatcttcgacggggagcaggcggccagggccagtgcggcagcgaacgggaacagcagggtcttcatcggcaatcgtccttgatacttggaacggggaaacaggggagacaggacagcgagggagccagcctcagctggcccatggcgggctgtagcgcaccttcagcgtgcgcacggccgggtcggcgcgcagcgcctccatcagcttggaatcgatgcgtaccgcgctctgcccggacacatcgagcatgccggcgacgccgccgtgcggccccttcagcagcaggtccaggcgcagtggcgtccgtcccgggcgatggcggtcgagcagcgcatcgatgcgctcccagaccgggcgctgctggcgcaggtccaggcgcagcgacagccgcgtggcgtagttggcgcagacctcatcgaagtcccagcactggcggatgcgcagcgcgaagccgccattgaactcgtcctcgcgcaggccgcccttgaccaccaggatgcggtccttggtcatcaggtggccgaactcggccatcgcgtcggagaacgcgctgcactcgacgcggccacgtccgtcctcaagctggatgaagatctggctctcgcccttgcggcgcacgccgaccacctggccggccagcaccgtctgcacctccgggcgccagcgcttttcgccgccgccgccaccaccgctgttggcgctccagatcttctccaccgaacccaggtcattgccgaccagatcgcgcacatcgtcgcgccagggatcgaacgggtggccactgagatagaagcccagcgtgtcgcgctcgccgttcaggcgctgcagcagcggccactcctcggcttcgggcaggtccagctggatcgtggtcgcgctcgggtccgggccaccgaacagcgagttctgtcccgaagcccgctcgcgggccatctggtcggtagccttgatcacctccggcagctgcagcatcagcgaggcacggttgcggccgagctcgtccaacgcaccacagttgatcatcgcttccagcgtgcgcctgttgagcttggccgaaccaacgcgcgtgcagaagtcgagcaggtccttgaacgggccgcccttcagccgctcctcgaccaccgcctcgcaggcaccctggccgacgcccttgatcgccccgaggccgtactggatggtgtccggcgtcaccgcttcgaacatgaaggccgactggttcaccttgggcggcagcacggtcaggccgaggttgcgcacctcgtcgaggaagccgaccactttgtcggtgttgtccagatcggacgacagcgtggccgccatgaactcagccgggtaatggcgtttcagccaggcggtctggtaactgaccagcgcgtaggcagcggcgtgcgacttgttgaagccgtagccggcgaacttctccatcaggtcgaagatttcgtcggccttggggccatcgacgccgcccttggctgcaccttcgcggaagatctcgcggtgcttggccatttcggccggtaccttcttgcccatcgcgcggcgcagcaggtcggcgccgcccagcgagtagccgccgacgatctgcgccatctgcatgacctgctcctggtacaccatgatgccgtaggtgtccttcaggatggcttcggtgcgcggatcgggatagatgatctcttcctggccgtgcttgcgcgcgttgaaggagggaatcaggtccatcgggccggggcggtacagcgacaccagcgcgatcaggtcttcgaaacggtcggggcgcgcgtccttcagcaggcggcgcatgcccgaggattcgaactggaacaccgcgccggtgttgccgttggcgaagatgtccctgtaggtgggcgtgtcgtccagcgggatcgcggcgatgtccaccggcgggatgccggcgcgctcatggcgcttgttgatcgccttcaccgcccagtcgatgatggtcagcgtgcgcaggcccaggaagtcgaacttcaccaggcccacttcttccacgtcgttcttgtcgaactgggtgaccgggttcttgccgaggccgttctcgtcgtgttcggcgtacagcgggcagaactcgctcagcggctcgggcccgatcaccacgccaccggcgtgcttgccggcgttgcgggtcaggtcttccagctgcagcgccaggtcgatcaggtcgcggacatcgtcctcggtctcgtagcgctggatcagttcggccgacgccatctcagagctcgggccttccttgcccttgcccagcgcatctttcaggtggatgccgaggatgttcgggatcagcttggagacgccgtcgaccagaccgtacgggaagccgagcacgcggccggagtcgcgcaccaccgccttggcggccatggtgccgtaggtgatgatctggctgacgcgctcgcgcccgtacttgcgggcgacgtagtcgatcacctcgtcgcggcggtccatgcagaagtcgatgtcgaagtcgggcatcgacacgcgttccgggttcaggaagcgctcgaacagcaggttgtacggcagcgggtccagatcggtgatcttcagcgcccacgccaccagcgaaccggcacccgaaccacggccggggccgatcggaataccctggttcttgccccactggatgaagtcggccacgatcaggaagtagcccgggaagcccatcttgatgatggtgttgagctcgaattccaggcgctcgaaatactcttcgcgggtcttgcccggcgccagcggattcttctccaggcgctcttccaggccatcgcgcgacatcttctggatccaggtgtccagcgtctcgtcgtccggcaccgggtagttgggcaggaagtaggtgcccagccgcatctcgatgttgcagcgctcggccagcgccagcgtgttgtcgatcgcatcggggatgtcggcgaacagcgcgcacatctcctcggccgacttcaggtactgctggtcgctgtattcgcgcgggcgcttggggtcgtccagcacgcggccggtggaaatgcacacgcgcgcttcgtgcgcgctgaagtccgacggcgacaggaagcgcacgtcgttgctggccaccaccggcaggccacgctggccggcggccatcagcgcgaactggttgaaggtttcctcgccctcgcggccggtgcgggtcagctccaggtgcaggccatcgccgaacacgcgctgccagtcggccagctgctgctcggccagttcatgcttgccgtccagcgccaggcgcccggccaggctctgccgcccggccaatgcgaacaggttggcgttgccggccttcagccagtccgggtgcacggccacgccgccctcggggcgatggccttccatccaggcgcgggtcagcagccgcgacaggctcaggtaaccctcgcggtcgcggcacagcagggtcatccgccacgggtcctggccttcctcggcgatcagcacgtcggcaccggcgatcggcttgatgcccacgccttcggcggccttgtagaacttgaccagggcgaacaggttgttgaggtcggtcaccgccagcgcgggcaggccgagttcgaccgagcgcgacagcaggttggcctgcttggccttcttcgggtccgcctggtccggtttggccggcacacggatggtggagtccgccagcgagaactcggtgtggacgtggagatgtacgaagcgggagttggacatgccggaccaggttggagcgcgcgggccccgggtgctgacggacgatcgtcgccggggtcgggaagcgctggaatgcccggtcagggtagcgagggcagggggttgccacaaggcttgacaggggcacggcgtggcgccggattcaggcgtgagggaggccgccttctgtagagccgagcccatgctcggctgtccacagcagccgagcatgggctcggctctacaactccagcaggctcaggcgatggccgccgcctgcgtcaggcccaggcactcacgcaccggggcgaagctgcgccggtgctccatgcaggggccgtgctcgcgcagggcggccaggtgggccggggtgccatagcccttgtgctgttcgaagccgtactgcgggtggcgggtatgcacgtcctgcatgtaacggtcgcgcgagaccttggccaggatcgaggcggccatgatcgcgcggtcgatgccatcgccgccgaccagcgcctgcgccggcagcaccaggcccttgggcaccacgttgccatcgatgcgggcgaagccggccacatgggcaaccgctgcaacgacgtcacgcatgccctgcagggtggcctggtagatgttcaggcggtcgatggtgtccacgtccaccagcaccacgtgccaggccagggcacgctcgatgatgcggtcatgcagctgctcgcggcgggccgccgtcaactgcttggaatcgtccaggccgttgatgcgtggccgtgacggatcgaataccaccgccgccactgccaccggcccggccagcgggccacgtccggcctcgtcgacgccagcgaccaggcgttccggctcgaccaccgtcgcgccgtcgaacagggccaggctggccgctgcggcgtgacggcggctcatgcctgcgcctggtcgcgcatcagcagttcgccgacggcatcggcggcacgcgccgaagcattgcggcgcaggcgctcgtgcagtcgcacgtacgtgtcctgcaggtcgatcacccgctgcgggtggtcgaaccattgctggatggccgcggccagcctgtccggcgtgcagtcgtgctgcatcagctccggcgccaggtcctggccggccaggatgttgggcagggcgaagcggtcgaccttgatcaggcccagcgccttgaccaggcgataggtcagttcgttgacgcggtaaccgacgaccatcggccgcttcaccagcatggcttccagggtcgcggtgccggaggccagcaccaccacgtcggcggcgatcatcgcgttgcgcgcctggccatccagcacgtgcgagtaggccaccggcaacgccgagcgcgacagctgttcttcgatcagctgccggcaggccgggttggcggcaggcaccaccacatgcaggcccggaatgcgttcagagacctgccaggcggcttcgaagaagggttcgcccaggcgcgagatctcgcccaggcggctgcccggcaacaccgccagcaccttggccgaggtcggcagcccgagcgcggcacgggcttcctcgcggttgccctgcagcggaatgtcatcggccatcgggtggccgacgaagcgtgcgtcgatgccgtgcctggcatagatcggcggttccatcgggaacaggcacagcaccaggtccgcgctgctgccgatcttctcggcgcgcttctcgcgccaggcccagaccgagggactgacgtaatgcacggtgcgcacgccgcgttgcttcagccagcgctcgatgcccaggttgaagtcgggtgcatcgatgccgatgaacacgtccggctgccattccagggcgcgctggcggaacgccgagcgcagcttgagcagccgcggcaggtggcgcagcacttcggtcaggcccatcaccgccagctcgctggcatcgtgccaggtctggcagccggcgctgcgcatggcatcgccgccaatgccggcgaactcggcattcgggaagcgcgccttcagttcacgcaccaggcccgcaccgagcaggtcgccggacgcttcgccggcaaccagcgcgatccgcaacgggcgctcgctgagcacccgctgtgcgggaacgctgccggccatcgaggccaacggaatcaccgcggcgccggccggcgcctggccggtcgtgctgctcatcgcagcaagggcctctcggcgtgctcgatgaagtccagcatggccttcacgtcattgctgtcacgcgcctgttcggtcagctgctgcttggcttcggccaacggcaggccggccacgtacagcgtccggtaggcacgcttgatggccgagatgcggtcggcgtcgaagccgcggcgcttcaggccttcgctgttgatgccgcgcgggcggcccagcgaatcggtaccgaccatggtgaacggcggtacatcgccattggtcagcgcgcccatgccgaggaaggcatgcgcaccgatgcggcagaactggtgggcaccggcgaagccgctgatgatcacgtagtcgcccacggtcacgtggccggccagggtggtgttgttggagaacacgcagaaattgccgacatggcagtcgtgcgccacgtgcgtgtaggccagcatccagttgtcgttgccgatggtggtgatgccgccgccgccgccggtgccacggttgagcgtgacgaactcgcggaacacgttgcggtcgccgatcaccagttcggtgcgctcaccggcgaacttcttgtcctgcggctcgccaccgatcgcggcgtggccgacgaagcggttgtcgcggccgatccgggtcgggccgtggatgctgcaatgggggcccaccaccgtgccggcgccgatttcaacatcggggccgatcagggtgaaggcgcccacctgcacatcgtcggccaggcgcgcggccggatcgatgacggcggtggggtggatccgcggtgcgttgtcagtcattgctgcctccagtggatcagcccttggcgccggcgcacatgacctcggccgacgcgacgacttcgccgttgaccttggcttcgccgtagtaccagcccatgttgcggatcaggcgcttcatctgcacgtccagcatcagcacgtcgccgggcacgacctgcttgttgaagcgggcgttttccaccttgaccatgtagaacagcttggactgcgcatcgcggccgagcgtgagctgggtcatgacgccgccggcctgcgccagcgcttcgatgatcagcacgccgggcatgatcgggcggcccgggaagtggccctggaagaacggctcgttgatgctgacgttcttctgcgccaggatgcgcttggcctcgacgtcgagttcaagcacccggtccaccagcaggaacgggtagcggtgcggaagcagttcctggatctggcagacatcgatcggaagctgcagcgaatcgttcattctttctccttgccagcagccaggacgcggcgagccaatgcgtccagctgcttgaagcgcgcggcgttcttgcgccacgtgcggttgtcggtcaacggggtgccggacgagtactcgcctggctcatggatggagttgcggaccaccgacttgccggtgatcacgaccttgtcacagatttcgaggtggccgaccacgccaacgtggccgccaagcaggcagtagcggccgatcttggcgctgccggcgataccggtgcagccggcgatggccgaatgcgcgccgatctgcacgttgtgggcgatctgcaccaggttgtccaggcgcacatcctcgtccagcacggtgtcttccagcgcgccgcggtcgacgcaggtattggcgccgatctcgcaatcgtcgccgatgcggacgccgccgagctgcggcaccttgatccacttgccagcgtccatcgccaggccgaaaccgtcggcgccgagcacggcaccgggatgcacgcgcacgcgcttgcccagcgtgacccgggtgaccagggtcacgcgggcgatcagttcacagccggcatccaggctgcagtcctcgccgatcacgctgccggtgccgatgatgcagttctcgccgaccacgctgcgcgcaccgaccgaaacgaacgggccgatatgggcgctggcggccacctgggcgctggggtcgatgacggcgctggggtggatgcccggcgggcgggtcggcgcgatgtcgaacagcgcggcgatcttggcgaacgcggtgtacgggtccttggcgacgagcgcagtgcccggggcggcctcggcgtcgtcggcacgcaggaccaccagcgaggcctggctgtcggccagctgggcgcggtagcgcgggttggcaaggaaggtcagctggccagggccggcatgggcgagggtggccacgccatggatggcggtggcggggtccccatggacctgcaggccgaactgctcggcgagttgctgggcggtgtaggtgggagtattcacggcgggagtttaacgtgtgacgccatttcggtcatgcggggggcagggcttggcgcctgcctggtacgggcgggaggcggcgggtggccctggccaggacacgcaaaaccccctccatggtgctcgatggcgccatccatggcgccaacggtcctgtccagggccacccgccgcctctggacaatttcccgcgagcgcggccaaaagcccatgccgtgcagtgtcatctgcaaaacgaaaacgccgggcaatgcccggcgcttcgcaccccgtctggtggagagcccccctttgttaaggggggcgcgccagcggcgcgggggataggtgaaatgcgcgggcaattcaccggaggtggatcagttctgaggaacaacgttcctcagaactggccaccgaacgtgaattgcagacgctcgatcttgtcatcgtcttccttcttcagcgggaaggcgtagctgatcgagatcgggccgaccggggcgcgccacagcagggccacgccggtggacacgcgcagctcgttggccttgaagttctgggtgccgttgtagacgttgccgaagtcgacgaaggccgacacgcgtgccgacgggctgtcgaacaggcgcgggaagtaggcttcgaccgaaccgacggtcttcagcgaaccacccagcggctggccttccggataaccggtggtgacttcgcgcgggccgagggtgttgtcctcgaagccgcgtaccgagttggtgccaccggcgtagaagttctcgaagaacggcaggccgctggcggtgacggtgcgggtggtgccatccggattggtcagcgtacgggtgtagtcgttgccgtaggcatcgccgtagccgatttccgcgcgggtgttgatcaccagcgacggcatgatcggccagtacttgctgatctggtagttcagcttgtagtactcgatggtcgaacccggcagcgtggtttccaggccgacgcgctggtaggtgccgcgggtcggcatgaagtagtcgttgcgcgagtcgcgcgcccagcccagctcggtgcgccaggcgtggaaggtgcgcttaccgaccgcgttgatgtagtcgatgatcgactgcggggtcgagccctggtaggtggtgatctggttgctgtcgatgccgaacatcagcgagacggtatcggtctcggtcagcggcacgccgaacaccacctgcgccgaaccattggtgctgttgtactgcgcggtattgaagtcggagtagtccagttcgcgccaggacaggttatagcccagcgacacgccgtcatcggtgaagtacgggttggtgtagctgaagccgtagcgctgcaggtagctgctgcgcgaggcttcgaccgacacgcggttgccgccgccaaggaagttgttctgcgacagctgcaccgaggtggtcatgccgtaggactgcgagtagcccaggccgaacacgaagctgcccgaggtggtttccttgacgttgtagacgacgtcgacctggtcgttgctgccgctgacggccggggtctccacttccaccgattcgaagtagcccaggcgctgcaggcggatcttggagcggtcgatcgcggcctgcgagtaccagctgttctcgaactggcgcatttcgcggcgcatcacctcatcggaggtgcgggtattgccacggaacaggatgcggcgcaccgacacgcgcgggccgggcacgacctgcatgttgatggcgacggtctgctcggcgcggttggtggtcgggatcgggttcaccttggcgaacgcgtagccgatgttggacagcgaattggtgatggtgtccgagctgaattccagcagggcacgcgagaacgtgtcgccggacttctggatcaccatgcgctcgacgtcctcctgcgggaggatggtgtcgccgctgaccttgatctcggagatcttgtactgcgcaccctcggtcacgcccgcggtcaggaacatgtcgcgcttgtcggggctgatcgagacctgggtggaatcgatgctgaaatcgacgtagccgcggtccaggtaccaggagttgagcttttccaggtcaccggacagcttttccttggagtactggtcgtcacggcggtaccacgacgcccagttgtgctccttggactcccaggtctccaggatgtccttgctctcgaacttttcggtgccgaccaggttgacgtggcggatcttggccgccttgccttccttgatggcgatggcgatgtccacgcggttgcggtccagcgggctcaccgtcggggtgatgtcgacgttgtatttgccacggtcgttgtactggcggcgcagttcctgggtcacgcggtccaggctcaggcgatcgaaggtgccgccctcggtcaggccgatgtcggacaggcccttgagcagctggtcggacttgatgtccttgttgccggtcacggtcagcttgttgatcgccggacgttccttgacggtcaccaccaggatcgtgccctggcggtccagctgcacgtcttcgaagaagccggtcttgtacagggcgcggatcgtctcgccgaccttgttgtcggtgaccgtctcgccacgttccaccggcaggtaggtgaataccgtgcccgagctgatgcgctgcaggccatcgacgcggatgtcgctgacagtgaagggctcggctgcctgggccagggcgggagcgccggtgacggcggcgagggcgagggccagcaggcggcgattggggagtcgcgtcatgtcacgtccggtaggaaggtcgatttcattggtgcgggatgccgacgctgtagacggcaacaacatggaaaagttcatcgcgggaccaggccgaggatgtcgttgtagaacgccaaccccatcagcccggccagcaacgccaggccgatgtattggccggcggcgatggcacgctcgctcagcgggctgcccttgaccaactcgataaggtaatacagcaggtggccgccgtccaagatcgggatcggcagcaggttgatgatgcacaggctgagggacagcagggcaaggaactgcaggaaccagtcgaggccgcgcttggccgagacattggccacgcgggcgatggtgaccggcccggaaacgttctgaagcgaggccttgccggtgacgatgcggcccatcatgcccagcgagtcggccgccaggcggccggtttcgcgtaccgcgacggtgaccgagtccaggggaccgtagcgcaggagggtgtcgtagggggggctgaacttggtcgggaactgaacgccgatctgccacgtggggccgcccttggcgtcctggcccttgcgtggcgtcacttccagcgccaggcgctcgccgccacgcaggacctcgatcatgcccgggccaccggcacggcccagggcctggatctcgccgatcacctggtcggcgccgtcgatgcgctggccgtcaatggccacgatcaggtcgcccggctgcagttgcccggccaccacggagtccgcggtgagcgactcgaccagcgcgggctgcagccacgactgccagtacatgccagccaggatcggcacccgccgctcatcgaaacccgccggcagctgcgacagcggcagggtgcgcgtgcgcacctggtcggccgtatccagcacttccagcttcacgtcgcggcggtccatcgcggccgcggtcagtgccatgctggcctcgccgagggtgaccacctggcggtcgtccacgcgcagcacgcggtcgccgctggccaggccggcactggcggcgatgccgctgacgcggccgacggtgggcgagtaatcctgcttgccgatcacgaacatcgcccacagcaggaggatgcacagcagcaggttggcgatcgggccggcggcaacgatcgcgatgcgctgccagacggtcttgtggttgaaggcctggccgcgctcgtgcgggtggacttcgacctcgcgttcgtcgaggaacttcacgtagccacccagcggaatggcggcgatggcgaactcggtaccatgccggtcgcggcgcgaccacagcggccggccgaagccgaccgagaaacgcaggatcttgaccccgcacaggcgcccgacccagtaatgcccgaactcgtggaacgtgaccagcagcccgaggctgacaatcatccaccagaccgatccgatgaagtcagtcatgcaggctcacagtggcgggcaggggcggcggcgtcatgctgggcgaggcggtcgttcaggcggcgtcgatggcgttcagggtgagctggcgtgcccgctggtcggcggacaacaggacctccagtgtatcggctgcttgcgtcggcagtgttgaaagagcgttagcaaccagcgccgggatcgtcaggaaaccgatccggccctgaagaaacgctgaaaccgcctcctcgttggcagcattcagcaccgccggtgcggtgccgccggcctgcatggcctgccaggccagggccaggcaggggaaggcgtcggtgtccggggcctcgaaatccagccggccctgggccagcaggtccagcccggccacgcccgattcgatgcgctgtggccagcccaggccaacggcgagggtggtgcgcatgtccggcaggcccatctgcgccagggtcgagccgtcgacgaactcgaccagcgaatggaccaggctctgcgggtgcaccagcacttcgatgcgctcaccgggcacgccgaacaggtggtgggcctcgatgacttccaggcccttgttcatcaacgtcgccgaatcgaccgagatcttcggtcccatcgaccacttcgggtgggcaacggcctgggccggggtgacctgggccagttcggcgcagctgcggccacggaacgggccgccggaggcggtcagcaggatccggcgcacgccggcgccgtcgacgctggcgtcgcgcgagcgcaggcactggaagatggcgctgtgttcgctgtcgatcgggatgatttcggcgccggcacgttcggcggtacgggtcagcagttcgccggccagcaccagcgattccttgttggccagcaggatgcgcttgccggcggcggccgcggccagggtcgaggacaggccggcagcgccgacgatggccgcgaccacggtatcgcaggcgtcgctggcggccagctggtccaacgcggcatggccggcatgggcttcggtggccagtccggcgtcgcgcaggccgtcacgcagttcggcaaacagcgattcgtcggcgatcaccgcgtgcgcgggtttgtgctggcggcacaacgccagcagcccctgcacctggcgtccggcggcgagcacggtcgcctggtagcgctgcgggtggcgggcgatcacgtccagcgtggaggcaccgatcgagccggtggcgccgaatacggcgacccggcgcaggtctgcagcagcattcatggtcagaacccgaagatttccttgcccagcgcgaacaccgggacggcggcgaggacgccgtcgacccggtcgagcacgccgccatggcccgggatcaggtggcccgaatccttggcgcccgcgtggcgcttgatgaggctctcgaacaggtcacccagcaccgaggcgaacacggccacgaccgcggtgatcagcaggcccggcaggtgtgcggtatcgatcccggccagccagcccaggccgacggccacggcgacaccggccagcaggccgccgaacaggccttcccaggtcttgttggggctgatccgcggggccagcttgtgcttgccgaaatggcggccggcgaagtaggcgcccgagtcggccgcccacaccagtgccagtgcagccagcagccacaggtggccctgcttgcccggcggatcgccaccggcatggatcagcaccagcgcggcccaggcgggcacgatggcaagcgtgccggccagcatcttcaggatgcgcgagggcgccgacggctgtgcaccgaaattgaagaagcgcagccagaccagcgcggccagccaccaggcaacgccggccagcgtggttatctggaacagcaccagcgtgctgccatcggcccagaccagcagcaccatcagcagcaggttcagcaccagaagtacggtgcgtgccagggtgtcttcgataccggccagcttcagccattcccacaggccgatcagcagcaccgcagcggcggcggcggccagccattgcgtgggcagcagcaggatcgccgcaatggcaaccggcgccatgatcagcgcggcgaggactcgggtcttggtcatgggctggaagtctcggtggccagtgcggcaatctgggcgctggtcaggccgaaacgacgctcgcggccggcataggcgtccagcgcctgctgcagctgcccggcatcgaagtccggccacagggcctcggtgaaccacagctcggtgtaggccagctgccacagcaggaagttgctgatgcgggtgtcgccgccggtgcggatgaacaggtccggcggcggcaggtcggcaagggcgacctggctgcccagcagcgattcgtcgatctgctcgggcaacaggcgaccggccgccacttcgacggccagggcgcgcgcggcgcgggcgatgtcctggcggccgccatagctggccgcgatcgacagggtcagggtggtgttgtcggcggtgcgctgttcggccagctgcatgcggctgaccagcccggcaccgaagcgctcgcgttcgccgatgaagcgtacgcgcacgccgcgccggtgcagctcgtccacctcgcggtcgagcgcgccgaggaacagcttcatcaacgcatccacttcctcctgcggccggccccagttctcgctggagaaggcgaacagggtcagcgccggaatgcccagttcaaggcagcgctcgatggtgcggttgaccgcgcgcgcgccggcacggtggccgatcacgcgggggcgacggcgctgctgtgcccagcgcccattgccatccatgatgatggcaatgtggcggggcagggcggccggtaacggaggcggggctgaaggcatcgacttcagaccgacagcagttctttttccttgtcggcgacgaccttgtcgacgtccttgatgttggcgtcggtcagcttctggatgtcgtcttcgccgcgcttcttctcgtcttcgctgatcgccttgtccttgaccagcttggcgatttccttgttcgcgtcctgacggatgttgcggatcgcgatcttggcgccttcaccttccttctgcacctgcttggccagctccttgcggcgctcttcggtcggcggcggcatgttgatgcggatcgcggtgccgagggtgttcggggtgaactcggcgttgtagagacccttttcgatctccttgatcatgcccttgtcgaacggcgtgaccagcagcgagtgcgcgtcggcgttggagatcgaggcaacctggttcagcggggtgctggcgttgccataggcactgaccgtcacgcggtccagcagcgcaggcgtggcacgcccggtccggatggaggtgagggtgtgcttcagagcgtcgatgctcttggccatgcgcgtctgcgcgttgttcttgatgtcgttgagcatcgcccggtcctggatgtatctggaatcgggcgattataggcgaatacgggacgctgccgggcctgaatcggcccgatcgccgcttcgcgctcaggctcaggccgggtcgcggccctggaccagggtgccgatgttcgcgccgttgaggatcttcagcagctcgcccggctggcccatgtcgaacacgcgcatcggcaggtcgctgtcgcgggccaatgcgaaggccgccgtgtccatcacttccaggccgcggcggatcacttcgtcgtagctcaggctgtcgaagcggaccgcatcgctgtgcttgttcgggtccttgtcgtacacgccatcgaccttggtggccttcagcagcaggtcggcgccgatctcgatcgcgcgcagggcggcgccggaatcggtggtgaagaacgggctgccgacgccggcggcgaagatcaccaggcggcccttttccaggtggcggatggcgcggcggcggatgtagtcctcgcacacgtcgttgatcttgatcgcgctcatcacgcgggccttggcgcccagcttctcgagggcatcctgcatggccagggcgttgatgaccgtggccagcatgcccatctggtcgccggtgacccggtccatgccgccggcggccaggccggcgccgcggaagatgttgccgccgccgatcaccagcgccacttcggcaccggcctgctgggcttcgatgacctcgcgggccaggcgattgatgaccttcgggtcgatgccgtagtcctcgtctcccatcagcgcctccccggacagtttcagaaggatgcggcgataggcgagcttggacatgaggacctcgggtgcgtggaaatcgcgggcgattctacgcgcatgcggcgtcgtgccaaagtgttttgtgcactgcggcgcagaatccggtcgttcgccccggtcaaacggggcttcccgttcagcccagctcggcgccagcggtggccgacagctcgtcgtggccgagggcacctggcgagcgggcgatcacccggttgcggcccaggttcttggagcggtacagcacgtcgtcggctgcgcgcagcaggtcctgcacgtcggcgaagcgctcgtagccaccctgggtggccacgccggcggagaaggtgacgaacagcggcccgccctccagctcggccatcggcgtggcgacgatattggccagcacccggcggatcacgtccagggccacgctttcgctggtgtttggcagcagcgcgacgaattcctcgccgccgaagcgggcgacggtgtcactgttgcgcagctggccctgcagcttgccggcgaaggcgcgcagtacctcgtcgccggtcaggtggccgtgggcgtcgttgatcttcttgaagtcgtccaggtcgatgaaggccaccgacaacggccagccctggcggccggcgcgcaggaattcctgctccagcaccgcttccagctggcggcggttgagcacgccggtcaacgcgtcacgatgggcctggtcggcgaggcgcttggcgcgcgcctcgaactcgtcggcgcggcgtcgtgcctggtcggcgtcctgcagttcgcgcaggttgcgcagcgtggccagctcctgcgcgtgatcgatcagctcgcgcacccgcgccggtgaattgaggccggcatcaaacaggctggcgatgtcgggcagggcttcactgatgcgggcgaggacctggtcgaagcgcgcgctgtccagctccaggcggtcgtgcacctgctgcagggcgcgctcacgcgcggcgtcggcgtcgctgtccagccagatgtcggccaccgcgccggacagctgcacgcaggcctggaacggcgattcggcgacgtcctcgtcctcgctgtggctgatgctctccaccaggtagcggggcaggccccattgctcggccacccacgcgccgacctcggcatggctgcagcccagttcctcgcgttcgcgggcgaccaggtcgatgttgtcgcgtgcctcgcgcagcagcggcaggtagcgctccgactcggcctgggccaggcacagtacgcccaggtcctgcagcaggccggccagcatcagttcttccagccggcgcaggccgcgcgcctggcccagctggctggcagccagggcgctgaggatgctgcgcttccaggcgcgctggcgcaggtcgtggtcggcgccggtgccgccggtcaggccctgggtgacagtgaagccgagggcgaggctgatcgtggcgttcaggcccagcatggtcagcgcctggccgaggttctcgatccggcggcggctggcgtacagcggcgaattggcgatgcgcagcatgcgagcgctcagcgccatgtcgatggcgatgatgtcggcagcggtggcgatgtccgcttccgggtcctgggccagttcgatgatgcgcagggcaataccgggtggcgaaggcaggttgcggcagagcgccagggcagctgtcagctcgggaggcatgtcgggtcgttcaattccattaggacaagaatacctaggaatgcatcacagtccgcgattttcgttcctgctaaatgactgtggattccctgcgccgagtatcggcttgattcgcgcgcaacgcaaaggtgccggttgtgcgcaccaacggtgcgcacaaccggtgggccatgggttgatccctgggcccatgcataaaaaaagagccgcggtttcccgcggctccttctggtcgcttcacagccggaaggctggaatcagacctgcatcgccttggcaacttcggcggcgtagtcttccaccaccttctcgatgccttcgccgacgatcagcagcttgaagcctgccacgtcggcgccggcggccttgaccacctgctcgacggtggtgtcgcccagcacgtaggtctggccgtacagggtcacgtcgctgacgatcttgttgatcttgccgctgatgatcttttccaggatgtcggccggcttggccttgtccttatcggtcatcttggccagctcgatttccttttccttctcgacgaactcggccgggacgtccgcagccttgttgtgcggcggcttcagcgcggccacgtgcatggccaggccacgggccagctcgacgtcgccgccgatcaggtcgaccagcacgccgaccttgccgttggtgtggacgtaggcgccgatgttgccggtggtgtcgaccttgaccatgcggcggatctggatgttctcacccagggtctgcacggcggtggcgcgggcttcctcgacggtacggccgtcggccagcgtggcggccttcacggcttcgacgtcgttggcgcccgatgccagggcagcagcggcgacggcgttgacgaaggacttgaagttgtcatcgttggcgacgaagtcggtttccgagttgacttcgaccagcacggccttgccgccgtcctgggccaggcccaggcggccttcggcggccacgcggtcagccttcttgtcggccttggcggcgccggacttgcgcatggcttcagcagcggcgttgatgtcgccgttggcttcgttaagcgccttcttgcattccatcatgccggcgccggtgcgctcgcgcagttccttgaccagggaagcagtgatttccacgggattacctcacgaaagaaaggggttgggccggcatggtggccggcccgtgtgacacggtcctgtcacgcgccgatggctgcgtgcagggagggtggacgccgggcgtccacccggggcctggatcaggcctgggcgtcgtcgcccttcttggcagccttcttggccggagcgcggcgggccggcttctcttcgccttcagcagcggcttcagcgaattcttcctcgcgcaccgaagcggcgtgcggggcagccgccttgccttccagcacggcgtcggcagcggcgcgggcgtacagctgcacagcgcggatggcgtcgtcgttgcccgggatggcgtaatcaaccagttccgggttgtagttggtgtcgaccacggcgatgaccgggatgcccagcttcttggcttccttgatcgcgatgtcttcgtggccgatgtcgatcacgaagatggcgtccggcaggcggttcatgtccttgatgccgcccagcgaggcttccagcttgtcgcgctcgcgacgcaggcccagcacttcgtgcttgaccagcttctcgaaggtgccgtcggtttcaccggcttccagttccttcaggcgggcaaccgactgcttgacggtacggaagttggtcagggtgccgcccagccaacgctggttcatgaacggcatgccgcaacgctcggcttcttccttgatggtttcgcgggcgctgcgcttggtgcccaggaacaggacggtgccgcgcttctgggcaaccgacgagatgaagttcatcgcgtcgttgaacagcgggacggtcttttccaggttgatgatgtggatcttgccgcgggcgccgaagatgtacggagccatcttcgggttccagtagcgggtctggtggccgaagtggacgccggcttccagcatctgacgcatggtgacctggggcattgcaatactcctgatatggaaccagcgattccgcccgcggggataggtatgcgggacgcgtggaagcgcgatcggttccggggttgggcttccctgttgcctccgtggccgaactccttgcggagcaccccggcacggatgggggcagcaggtgtggattcaccggtgacgtccggtgtggacgggttcgcgcgcacgctggcggcaggaatccggtcgattatagcccgctgggggcgcttgctgcaattgcagggtcagttgcggccagatcgacctcgcggccgtcctgcaggcgtgcctggaagcggccgcctgcatagccatcggcgcgggcaggcaggggccagcggcgttcatggcccgccagaatgtagccggccaggccagccgtcagcagcgttgcctggccgtccgccgtgatgaagcgcagatcgtgcaggcggccgtgcagggtaccggcattgctgagtcgcagtacggccagagacccgtgggcctcgacgcggcccagcagccgggcctgcagtgctggccccgctgggccgcggaacagcggcagcgaatagcgcggcaaccccggcaacgtcggtgccagtacgacccgataggcctgttcagcggccgccgctgccggatcgcccggcaacagccagacgcgctgggtgctgccgggggccaggtccagccgcgccgggctgacccggatctggtcgctggggtgcagtcgttcggcgtccagctgctgatcccacgccagcacctgcacctggccctgccagcggccgggcccggggttgtgcaaccacagttcggcgctgccgccctgggccggcagctgcagggtggtcggcaacagctccagcgctgcggcaggcagtgccagcagcagtgccagcaggatcagcaacgcgcgcatcagtagatgagggtcacggagggtgttgcgttctcgtccgtcgccggtggtgcgagctcgcggacctggcgcggcgcctggggtgcgtcactgcgctggtgcggtgccgggcagcggatgccgccgccatcgtcgctgcaggactcaaccacggtcagccggatctgcagggggctgctgggttcggcccatgccggcaggctggcgaccagcatcgccccgatcaggaatgtgcgaaccacctgccatccaccatgatgaaagacttgctgcgcggtatcggcgggatgtgccggaactgtagcgccgagccggcgctcggcacggccttcgtccggtgggtgccgaccgttggtcggcacgccggtcagtaggtgatcgtcaccgtcaccaggtcgttgtaggtgccggccggcggctggccgctgaccggtggcacccggccatggatggtcaattgctgcgcgctgccggtaccggtgccgctggccgtgtcgacggtcagggtattgccccagcgcaggctccgcgccgagtcccggtagagctcgtaggcgaggtaataggtgcttccgccgagggtggtggccatgcgccgggtggtggtggcggtgggattgttctggccgttgttgaggccgacctggaaggcagtgttcttcaggcaggtcagggtgagggtggcggtccggtcgatgttggccggaatgccgccggtgacgttgccgaagtccatggtggtggtgacgtagctgccacattgcggcagcacgttggcggtggcggtgaagctgaaggctgcactggcgctgttggtgccggtggcgccgccattgcaggtggcgggcacggtggcggtaccgagcaggacttcgttccaggcccaggtcaggaccacgttggccccgctgaaggtgctgctgtacgcgccggaggccaggatctggttggccgggatctgcccgaacagctgtatggactgcgcaccgctgccgcccgtcaccagcggcacgttgtaggtcatggtcagttcctgcgcaggtggcgtgccgcgcggcaccagtccggtgacctggccgaagctggcgttgttgtacagctggaaattcagggtgtcactgctggaggtggccatcgtgcggaaggtggaactgctgccgccgccactgcctgcgccgatgcccacgcagacgcgcacgccggtggtggccagcaggctcagcgcggcggtggtgcaggtcaccgtgatgttgaggttggccgtactcgggccgggtgcattgctgttgatgttgccgaacggcagggtcggattggcgaccgccgtgcagaccgcggtggcaccggcgggcgccgctgccagcaggccggcccagagcagcaggacgagcagcagcaccctcatggcgccacctccgggatgcactgctgcggcgccggcttcggccgtgcgccggacgccaccaccttgggcaggtccggcactttcacgcggcaggggccgcggctggtggtgacgtacagcacgctgccggcggcaacgtcttccagatagagcaggccgtcgtagccgaccgtggcctggcggccatcgggcaaccgcacctcgctgccgacctccagaggctggccgtccattgccagcagggtcaggctcagtgacggccgcgagcgcagctggaaggtcacgcgggtgccggcgcgctggcgcggggtcacccagtcctcgatgcggtcggcgcgcatgtcttcgggcaggtccagggtgtcgatcgagacccggttgcgctgccaggacagcaacggactgaccagcagcaggccgcgatcatcggtgacgccgatcaggcggttctccagccgcaccgggacgccgcccaccccattggtgctgatcaccgcgaacgcatcggacacctcgcgcgtggcgaaggcgtgcccgcccatccacaccaggctgccgctggcgctggcgtaggcatagttgagtccaccctggcgcgaggcgccgaacgagtagcgaccgacatcgttgaggatgccgacctcggccaggccgccgttgccgtcctcgccgtggcgcagctgcgcgcgccagccgacgccgccggcgctgccatcgcccggcactggctgggtcacgtccgccacccagctctggctgtcgccgttgcgctggctcgaaaggctggcctggcggttgttgcccaggctggcagtcaccgacaggtagatgctgcggtcgtcgctgcggtccaggttctggtttaccgaaagataggccgaccagcgctggctccaggtacgtgaccagaacaggctggcatagcggttgtcgtctccatccgggtagcgcaggcgcagatagctggcgctgagcgtgcccagccgcagcaggtccaggccgagcgtggcctgctcgctgatgctcggcggcaggttgccctgcagcgcgccgaggtcgcggtagtcgccgtggctgcgtacgctgcgcagattgacgttgaagcgacggttgttccagctgtagcccagcgcccattgcccaccctgcaggccgtggtagccgctgtgcgcataggcggcattgaacacgccagcggcgccgagcagccaccagccaccgacaccggcctgggccaggccgccgccgccttcggcatgcgcctcgccagtgaaggtatcgctgatgcctccgcgccagctggcactggccacggtgcgatcgtcgtaggcgaaggagcgctggccgaagtcctcgcgcaggtggccgacgccggccgaccagtccgaaaggcccttggccagcagctgctgggtgccatagaaactgaaatccagcgtctgcatgcggccgaaggcatcggttaccaccacctgcgcattgccggtgccgctgatcccgggctgtgccgccagctggaacgggccgaccggtacctgcccgctgtactggcgcaggccgtccacgtagagctcgaccgtggagggcaccacggcctggccgaggaagctcggcgtgggcgtcagtacgcggtagggctgcagcccgtagttgcggccgatctgcagcccgcccaggcgcaccgggcgggtccagtcgacgaagccgctgtagaagtcaccgacctccagcgtcgttgcgctgtcggggaaatccaggctccagcgggtgtccagccgcacgctttcgccgcgccaacggcgatcgccgggttgctggtagcgacggctgatggcggtgttctcaaaagtcccgttgccgatgccgaacacgcgcagctccgagctcaggctgagattgcccagtgtgtccacccggctgccgtagacgtcgtagttgagcagcacgccgggcgaggcactgccggtcggcgcacgcgcctgcggccggctgagcaccgtggtcggcagggtcagctggtccagtggtacatccagtgccagggtctgcatgtgcgcgtcatagcgcaccaccgcaccgctgatctgatccaggtagaccggcgcatcgccgctggcgttgaagccaagctggcgcagcacctcggggctggcctgcagccggccgcggttctcggtgaatggcagcaggccgcgcggggtgctgttgagcgacacatccaggtacagcgcttggctggcggtcagcggggtcgggggaggcaggatggcatcggccgacacgccggatacatcaacggccgccacgccggacacatcggcggcctcggtcgccgcgggagccagggccgccaacagcgcgcccatcaacgcctcagcgagccggtgggggcgacagtggcgtctgttccgactcgccattgagcttggccgtgatctggtcgttgtcgcggtcgatcgccgtgcgttcgatcggccagcgcatcacctggcccggcagcacgtagcccagcagcccgggatggacaatgcgcgggcgcgcggcgctgcccagcgcaagatcggcgatctgtgcgtagctgtcgcccgtattggcgacttccacgccattgcggccgtccgccagtttcaccaggtgcgcctgcagccgtggggccaggcggccggccgaaggctgcacgaacaccgggatcgaatagcgcagcacgaactgcatgccctcggcacgggtggccaggtcgggtacctcgtccacgatcagccggtagtgccgctgtgcaggcggtggctcgctgtccggacgcatcacccgcaccagctgctgctggccggcggccagttcctgcatcggcggcgtggccatcacttcatcggtgggcagcagctgttcctggccgtcctgctgcacccagcggaacacgcgcacctgcagcgtcaccggtgaggtgccgctgttggtcagccacagctcaccggcacgctggcgggcttccagctgcaggctggtcggggcgacctgcaggctggtggcgccggcaccggcgggggccagcaggtacagggcgagcagcgccacgccggtggcgcgccacgggcggggtccggccatgcgggcgtgctccatcaataggtgatcgtggcggtaaccgtatccaggtagttaccggtggccgggttgttggtgctcaggttcaggatctggccatagacgatgtagggcacggccaggccagtgccgatgccggcctgggtattggtgccggttgtggcgccccagaccagggtatgtgcggcatcctggtagagctggtagccgacatagttgttggcggtcaccgcggcattggtgttcttcatgcgccgggtggtgacgtcgttggcggtgccggcgttggcgcccgcgttcagcgcaatcgtgtagggcgtcagtgccgagcactgcgcggtcaccgtaccctggcccagggtgggcgtggcggtggtcgaggccgccgtgccgaagtcgacgttggtggcggccgccgccgtgatggtgcaggccttggtgaccaccagggtgacgttgaaggtggtggtgtcggcggccagcgccgggctggaaagcagcagcccggccatgacccatgtcagcggggatcgaactggggatcgcatggacaacctccctgacccgaaggtccgttgaacaaggcgaagacggcacgttcggcgccgctttgacgacagtgggtccagcttaggaggcgtaagtgtctgtaatccgtgataaataggcaggcgcaagagtggaggccatcacgctttcactttccttgccggaatcgtgcatggcccggatcgccagttgggcggcgttcgttcagattgcggccggatcggcgataatgggtgccatgagcgtgaatctgaaaaccccgcaggaaatcgagatgatgcgcatcgccggccgcctggccagcgaagtgctcgacatcgtcaccccccacgtcaagcccggtgtcaccaccgaggaactggaccgcatctgccacgaccacatcgtgaacgtgcagggtgccattccggccaacgtcggctaccgcggcttcccgaagaccgtgtgcacctcggtcaacaatgtcatctgccacggcatccccagtgaagggaaggtgctcaaggatggcgacatcatcaatatcgacgtcaccgtcatcaaggacggctggcacggcgacaccagccgcatgtacttcgtcggcaccccgtcggtgatggcccgccgcctggtggaaaccacttacgaagcgatgtggcgcggcatccgtgcggtgcgtccgggcgccaccctgggcgacatcggccatgccatccagagctacgccgaaggcgagcgtttcagcgtggtgcgcgagtactgcggccacggcatcggcaaggtctaccacgacgagccgcaggtggtgcattacggccgcccgggccagggcctggtgctgcagcccggcatgaccttcaccatcgagccgatgatcaacgagggcacccgctacaacaaggtgctgccggatggctggaccgtggtgaccaaggaccgaaagctgtcggcgcagtgggagcacatgatcgcggtcaccgagaccggcgtggacgtgctgaccctgtcgccaggcgagtcgcaggtttcctgaagatgctgccggcgagttcgctgctggacacgccggccgcgtcgctcaacgacccggattgggctgctgccgcgcgccaggcgctgcagcaggccgacgcgcgcctgtaccgccgcttcgaccagggcgacaacatcgagcgcctgctggcgttgcgcgcgcgcgctgccgaccatctgatccgcctggcctggcagcgctgcctgccggccgacagcggcctgtcgctgttcgcggtcggcggctatggccgcggtgaactgttcccgcgttcggacatcgacctgctggtgttcggcgatccgccggcacaactggcgcacgaggcggcattggcgcgcctgttcgcgctgctgtgggactgcggattggctgtcagccatgcggtgcgttctgcattgcagtgccgggaggcggcggctgaccagaccgtgctgaccgcgttgatcgaggcgcgcccgatcctggccgatgatgctgcgcgccgcgcgctgcgcgaggcgatcgacgaccgcgaactgtggccggcacgcgccttcttcctggccaagctggaagagctgcgcaaccgccaccagcgcttcggcgataccgccgacaacctggagccggacctgaaggatggccccggcggcctgcgtgatctcaatacgctgggctggatggcgttgcgtgccttcggcgtgcgcgacctggaggccctggtcgggctcggccacctgggcgccgacgaagccgcggcgttgaagcgcgaacgtgcagtgctggcgcggttgcgcttcggcctgcacctggtcgcgcgccgtccggaagagcgcctgcgtttcgattaccagaagaccctggccgcgcggctgggcttcgaagacgatgccgagaacctcggcgtcgagaagatgatgcagggcttctaccgcgccgcgctggtggtgcgccggatcagcgaccggctgctgcagcgcttcgaggaacagttcgacggcgaggcccagccggagccgctgaccgtgggtttttccctgcgccgtggttacctggccgccaacgaggccgactggccacgcggcgacatcggccaggtgttcgccctgttttccagctgggccaacaacccgcaggtacgcggcctgcattcgctcactgcgcgtgcactggccgagtcgctgccgctgctgccggcctatgaccaggccgatgccgatgcacgcgagcagttcctggccctgctgcgcggccagcgtccggtcgatacgctttcgcgcatggcgcggctgggcgtgctgggccagtggattcccgcgtttgcccaggtcagcgggcgcatgcagttcgacctgttccatgtctatacggtcgaccagcacacgctgatggtcctgcgcaacatcggccagttcgccagcagccgcgccgacgagcgcttctcgatcgcgcacgaagtgtggccgcgcctgcgcaagccggaactgctgctgctggccggcctgttccatgacatcgccaagggccgcggcggcgaccactcggagctgggcgcggtggacgcgcgcgcgttctgccaggcgcatgcgctcagtggcaccgataccgagttggtggcatggctggtcgaacagcacctgcgcatgtcggtgaccgcgcagaagcaggacatcgccgatccggtggtgatccatcgcttcgccaccctggtcggcagccgcgaccgcctggattacctgtacctgctgacctgtgccgacatcgccggcaccagcccgaaactgtggaatgcctggaaggaccgcctgctggccgatctgtactttgccacccggcgcgcgctgcgcgaggggctggagcacccggtaccggccgccgagcgcgtggccgaggcacgtgacagtgtgcgcgcactggtgcgcgagcagggttacgacgatgccaccatcgaccgccagttcgcggtgatgccggatgagggcttcatccgcctgcgccccgagcagctggcctggcaggccgccgcactggtgccggtgaagcagggccaggcgctggtgaaggtgcgccggatcagcgtcgacgacccggcgctggaagtgttcgtgcactcgcccgaccgtgatggcctgtttgccgcgatcgtgatgaccctggaccgcaagggctacggcatccatcgcgcgcgcgtgctggacggtccggccgacaccatcttcgataccttcgaagtgaacccggccgacacctttgccgatggcagcagtgccaacctggaagcggcactgcgcgaggcactcagcggtgacctgtcgcgcctgcggccgtcgcgccgggtggtaccgcggcagctgcggcacttccgcttcgccccgcgcatcgagttccgcgatgaaccgggcgcaacccgttttgccctggtcgcccccgaccgtcccggcctgctggccgatgtggcgttcgtgctgcgcaaccagggcctgcgcgtgcatgatgcgcgcattgccacgttcggcgaacgcgccgaagacaccttcgtgatcagtgacgaacacgacctccccctgactgaacctgcccggcagcagctgcatgacgcgatgctggcctgcctggaccctgatcgaaacgccggagaccccgcctgatggccaccaagcccgccaagaagaccgccgcgacccccaagagcgcagcggcccggaaacccgctgctgccgcaccggccgcgaagaagacccctgcgccgaagaaggccgctgcggtgaaggccccggcgaagaaaacggctgcagtgaagcgtgctgtgaagaagccggccccggccaggagcgccgaagccgtccgcgccgaaaccatcgcccgcaagtcgctgcgcaagccgtcggcaccaggcgtggaagaactcaagttcggcatcgagagcgccttcgagcgccgcgccaccttgaccctgcacgagctggaagggtcgaccaagccgctggtcaaccgcgtgatcgacggcctggagagcggtgagtttcgcgtcgccgagccggacggccagggcggctggaaggtcaatgagtggctgaagaaagccgtgctgctgtatttccgcgtcaacgacatggcggtggtcgatgcacgcccggcgccgttctgggacaaggtcgaatcgcgcttcgccggctatgacgaagcgaagttccgccgtggtggcgtgcgcgtggtgccgggcgcgatcgcccgccgcggtacctacttcggcaaggacgtggtgctgatgccgagcttcaccaacatcggcgcccatgtcggcgaaggcaccatggtcgacacctgggccaccgtcggttcctgcgcgcagatcggccagcactgccatctgtccggcggcgccggcatcggtggcgtgctggagccgctgcaggccagcccgaccatcatcgaggaccactgcttcatcggtgcgcgttcggaagtggtggaaggcgtggtggtcggccaccacagcgtgatcggcatgggcgtgttcctcagccagagcacccgcatctacaaccgtgccaccggcgaggtcacctacggctacattccgccgtacagcgtggtggtgtccggctcgctgccgagcaaggacggtacccattcgctgtattgcgcggtgatcgtcaagcaggttgatgccaagacccgcagcaagaccagcgtcaacgacctgctgcgcggcctggctgactgaagatgacggcgccggaggatctggcgcagtccgcgatctaccagcatccgtccgacaccctgttcgggcggatgctgccgcgcctgctgcacgctccacgctggacccggctgcgccgcgcgctgtcgcggcgctggccgatgccggcgctggtaagcgatgtgcgcgacgtggtctacgtgagctggtgggtcgacgtacgccaagcgccgatgccaccaccaggccatcactacgtggtccatgccggacgcacgccctacaccatcctcagctaccggcacggccacttcgggcccgcgctggccgggccgctgcgctcgttgatgccgtctccccggcagagcaactggcgctggtacctgcgtcgtgacgacgatcgggatgggacgccagtggtgctgtttgatcgcaacgtgatggaccagctggccttcgtcgccggcgcgcgcgctttcagcgatgccatgcagccgcatctgtcggtgcgcttcgcgcacgtggtgcgcgccgatggcggtgggtacaccctgatcgagggcgggcagggcagtgcgccggcgctgcacctgcagtggcagggcgctgcgggctgggacgatgccgggtgggcagcggccttcggcggccaccaggccctgctgcgcttgctgacctgccaggacgaggccatcgcccgcacctgcgaccagcgctgggccagcacccgcattgccctgccggtggacatcgcgcagctgcaaccgctgcagctggaaggcgaacagcagtgcccgcgcctgcaggcgatgggcgtggcgctgcacgaggggctggccttccagctgccaagggtacctttccgggtcgtgtccgagcgcctgttgtgagattctggccctctgttttccagcatcacagatggccatgagcaccactgtctacggtttgaagaactgcgatacctgcaagaaggcgaccaggtggctggaccgcttcggcgtgccgtacaccttcgtcgactaccgcgacaacaaacccagcccggaaatgctgttggcgtgggccgcgcagctgggtggcctggccgcgatggtcaacaggtcctccaccacctggcggcagctgccggacaaccgcaaggccgccgattccgaggccgaatggaagctgctgctgcgcgagtacccgcagctgatcaagcgcccgctggtggtcacggccgatggcacggtcagccagggcttcagcgacaacggcttcaaggcccgcttcggcgtgggtgacgcatgagcgcggtgctcgacctgacctgcgagctgatcgcgcggccctcggtgacgcccgatgatgccggttgccaggcgctgctggcggcacgcctgaagcaggccgggttccagtgcgatcacctgcggctgggtgaggtcgacaacctgtgggcgacccacggccagggcgcgccggtactggtgctgctgggccataccgacgtggtgccgacgggcccgcgtgaggcctgggccagcgatccgttcagcccgcagatccgcgatggcgtgctgtatggccgtggcgccgccgacatgaagggcagcgtggcggcgttcgtggtggccgccgagcagttcgttgccgcgcatcctgatcatcacggcacgctggcggtgctgctgaccagcgacgaggaaggcgacgccatcgatggcgtgcgccacgtcgcacgcctgttcgccgaacgcggccagcgcatcgactggtgcatcaccggcgagccgtcctcgactgcgacgctgggtgacctgctgcgcgtggggcgtcgcggcagcctgtcggccaagctgcgcgtgcagggcgtgcagggccacgtggcgtatccggagaaggcacgcaacccgatccaccaggcggcgccggccctggccgagctgagtgcgcggcactgggatgacggctacgaaagtttcccgccgaccagcctgcaggtctccaacatccatgccggtaccggtgccaacaacgtgattcccggcgagctcgaggtggatttcaacatccgctacaacccgcactgggacgcaccgaagctggaagcggagatcaccgcgctgctggaacggcatggcctgcagtacacgctgaagtggcaccgcagcggcgagccgttctacaccccggagggcacgctgcgcgccaccgcgcgtgcggtgctggccgagcacatcggccgtgcaccggaagaaagcaccggcggcggcacctccgatgcacgcttcatcgcgcccttgggcgcgcagtgcatcgaagtggggccggtcaacgccagcatccaccaggtggacgagaacgtgcgcgtggccgatctggaggcattgccggggctgtaccagcggctggtggagcggctgctggcgtgaacctgcgacgctgggtgccgaccgttggtcggcacgcctttcgccggcattgctttcctgtagagccgagccatgctcggctgcttctgcagggaatgcccagccgagcgtggctcggctctactcagaaaaaatgaagaacggcggctcgaccgctttttcccagtagctcggcgccgccatgtagaagcgctgcgcctcggcccgggcgaaccagcgtgcggctgcgtcggtgtccttccccacgcccggtgcaccgcggcccagcagcagtccggcgaagtactggccgaacacattgcccttctcgccggcacgctggtacagctgcagcgcacgtgcgggatcgcgcggcagtcccatgcccttttccagcagcgcgcccaggtctacctgcgcttcggcatcgccacgctcggcgcggcgctggatctgcgcaaccagtggatgcacggtgccatcctgtgcggccaccgcatccggtagccgtgacgatgaactcgggtagcgctcgtagatcattccgcgcaggtcccagcgcagcgcctgctgcgcgtcgcctcgctgacgataggccttggcgagttcgtagaacgcatagggattgccgtggtaggccgccgccaggtaggcgcgttctccgcgtcgccaggacgcacgcagcaccggcgccggattgatgtgggggctgtcggcatgccgcagcgtgccggagatccagatcctgcccagtgcttcttccgccttggtgttgtggaaggtccagggtgtgaccgcggcggcacgctcgtagtaggcgatggcgcgcggatcgttgaagcgctcgaaggtttgcgcagtgtcaaaggcaccctcgaagctgccgtcggtgccgcgttgttccaggccctgcagctgggccggcggcaggggcgagggtggggccagggtctggcaggcgaccaggcccaggcagagcagggcggccagcgccacgttgcgtccagtgcggtgttgcatttccattacacgtttcacggcgcgccattatgcgcgccggggagtggttgccaacgcaacggttgcgctgcgccggaaagcggggtagggtcgatgccatgtcgatccgcctggccaccgccgtcaataacaacaaccgcaataatctgcgcgcgaataatcgtgcgcggccgatgcgggactgcgccctgggtagatagacagcaacacacgcccggacaccagaaaacccgcatcggtcgatgcgggtttttttgtgcccgggcgtagtcccacccgggcctggatggccggtcgaacaccttcccacccgtgaaatccccaacaggagctcccccatgtgttcgatcttcggaatcttcggcctgcaggccggtgacgatcttcccgccctgcgccggcacgcgctggaactgtcgcaacgccagcgccaccgtggcccggactggagcggcgtgtacctcgacgaaggtgcgctgctggtccatgaacggctggccatcgtcgatccggccggtggttcgcagccgctgctgtcggccgatggccagctggcgctggcggtgaacggcgagatctacaaccaccaggcgttgaaggcggcgctgaccaccacctacgacttccagaccggctcggactgcgaggtgatcaacgcgctctaccgccagggcggcgcgccggcgcagtggctggaacagctcaacggcatcttcgccttcgcgctgtgggaccgtgacagtggacgcgtgctggtggcgcgcgacccggtgggcgtggtgccgctgtactggggccacgatgcccaggggcgcttgcgcgtggcctcggaaatgaaggcgctggtcgatacctgtgccgatgtcgcgcagttcccgccgggccactatttcgacagtgccagcggtgagctggtgcgctactaccagcaaccgtggcgcgactacgccgacgtgcagggccgccaggccgatctggctgaactgcgccaggcgttcgagcatgcggtggagcgccagctgatgagcgatgtgccttatggcgtgctgctgtccggtggcctggactcgtcgctggtggcggcggtggccgcgcgctatgcacgtcgtcgcatcgaggatgggggacagaccgaagcctggtggccgcgcctgcactcgttcgcgatcggcttgaagggctcacccgatctggccgccgcagcgatcgccgccgaagcgctgggcaccgtgcatcacggtttcgagtacacgttcgaggaaggcctcgatgcgctgccggaggtgatccgccacatcgagacctacgacgtcaccaccatccgcgcatcgacgccgatgttcctgctggcgcggcggatcaaggcgatgggcgtgaaaatggtgctctccggcgagggcagcgacgagatcttcggtggctacctgtacttccacaaggcaccggatgcgcgtgaattccacgacgagctggtacgcaagctcgacgccctgcacaactacgactgcctgcgcgccaacaagtcgatgatggcctggggcgtggagccgcgcgtgccgttcctcgaccgtgagttcctcgatgtggcaatgcgcttcgatgccgcacacaagatggtcggtgccggttttggcggccgccgtatcgagaaggccgtgttgcgcgaggcgttcgacggctacctgccggacagcatcctgtggcggcagaaggaacagttcagcgatggcgtgggctatggctggatcgatgggctgaaggcacatgccgaggcgcaggtgagcgaccgtgtactggcggccgccgacaagcgcttcccgcacaacccgccgcagaccaaggaggcgtactactaccgccacctgttcgagcagttcttcccgagccgggcagcggccgagaccgtgccgggaggcaagtcgatcgcctgttcgtcgcccgcggccatcgcctgggacgccagcttcgccgcggcggcagatccctccggtcgcgcgatcgccggcgtgcacgagcaggcactggcctaagcacccccaaaaggggacggaggggattaagtcgtttgtgccattaacgccttaatcccctccgtcccctttttgtatgatcgccccctgcacattggggaatgttcatggacgtacaggcaggcggcaacgcgccgcccacgaaatggggatggcgctacctggcctgggccggggttccgttgctggctggcgtgctgctggcgcggtatgccgggccggcggcgcccgaggcggttgcccgtgcctccgtcgccgccgaaggcggctgggtgcagcatctggcgtctccgctgggcctgttcctgctgcagctgctggtactgctgctggtggccaagggcgcgggggcgctgctcaagcgcatgggacagccggcggtgatcggcgaaatggccgctggcctgatgatggggccgctggtgcttggcagcctgctgccgcagctgcatggtgcgctgttcccggccagttcgctgggcccgctgggcatgctcagccagctgggcgtgctgatgttcctgctggtggccggtgccgaactggacctggcggcgctgcgtggccgccggcgtttcgcctttaccgtcagccatgccggcattgcagtgccgttcgtgctcggcgtcgccttggcgatctggctgtatccgcagcacggcccacagggtgtgggcttcaccgcattcgcacttttcgtaggcatctcgatgagcatcacggccttccccgtgctgctgcgcatcctggccgaccgcgggatcacacagacgccgctggggcagaccgcgatcgcctgcgctgccttgggcgatgccaccgcgtggtgcctgctggcgctgatcgtggctgccgcccaggccagcggctggttgccggccagcctcaacctggtgtgcgtggtcgcgttcgtggcgctgatgctggggctggtgaagccgtggttcgcgcgccggcagattgcgccgggccgtgaggggcgctggctgctcggcatcctgctgctgtcgctgggcagtgcgctggtcaccgagatgctgggcatccacgcgctgttcggcgcgttcgctgcgggtgtcgcggtatcgtcgaacgcgcagctgcgtgacctgctgatggcccgtgtcgagccgttcgcggtcacgctgctgctgccgttgttcttcgccatgaccgggctgcgcatgcgcgccgatgcgctgcaggccagcgacatcgtgctgtgcgtggtggtgatcgcggtggccacgacgggcaagctgctgggcaccttcagtgccgcgcgcagtgccggcatgcccacgcgcgaagcgtggcggctgggcgcgctgatgaacacccgcggcctgatggagctgatcgtgctcaacctggggtatgagctgggcctgctcggtgaccgcctgttcgcggtgctggtgatcatggcgctggtgaccacggcgatgaccgggccgctgctgaacctgatcgaacggcgcagggcctgaacgttgaacggtagtgccggccgctggccggcaacctgatgatgctggacacacctgcatggatgccggccagcggccggcactaccgcgctggcaccagtgtcatcacgtgctgcgtcttgcccggcaggaacggtgtcgggcgcccatgcacccagtcctcgtggccggcaccccagtacggtgacagcggatggccgctctggccgccgggcatgtgcacgatgccgtcggcctcgtggccgggcgagaccaccatgcgctcggaggcgccgaagttcggcgtctgcacgcgcggcatgtcccggtcgccgggcaggcggtcggcgggcatgcacagccagcgcttggcgatgtccggcagcgcccgtgcgatggggtggcagatcgccgcggtattgcgttcaccccagctgcgcttggccagcggcccctgcttggccagctcaccctcggtacggcgggcggcgtcgatcagcagcgcatcccagctgtcgaaggccggtggcagcaggttggccgggcgctgttccagcatcggccaggccacgccttccagctgtgccaggcgtgggtccaggtaggcatcgcccagctgcgcgttggccggggccagcagtgcatcggacagcgtggccatgacctgcgtgcggaattcacgcaccacccggtagctgaccgaactggccgaggcgcgcccgccccattgatggctggcctccttcaaacgcttcagcgcagggtcgtcactgcgttcgatgacgtcgtgcagcagagcccaccagcgctgcaggaacaccgcgcggtcgtcgagctggatcgccagaaggtcgtgctcgtcgaagcgctcctggattgccagcaggtcgcggatctgccgcgcccgcgcacccaggtcatagccgccgttgccgacgctggcgagtgcctcgccgtcgaggacgcgtccattggcggtccacaggcgatggttggggggatcgatcaatgccggcgaggcatcgctgcggatcggccacggcgcgcagccctggttgctggcggcattgaagccggccggtgcacagccggggccgcggtccgggcgagcgccgatcaggcgccaggcaatgcgcccgctgcgatcaccgaccaccaggttctgtgcggggatgccggcacggtcggcgaagtgcagtgcaccgtcgaggtcaccggcgcgggccaggtcagcgaaatccaggcgtacggcaccgggcaggtgtgcgacccagcgcagggcgtcgccactgccatcggcatgggtatgcaggatcggcccccagtcggtttcgcgcaccgcgaacagcacgtcggcctggccggccacggcgatgcgctcttcgtgcacggtcacggcggcgctggccggttccgtgcgatagtccgccgtgtcgatgtagctgttggtgaagccccaggcgacgtgcccgttgctgccgacgatcaccgccggcaggcccggcagggagaagccggtgacatcgacctggccgccggcggcctgcgggtcggggtagcgcaggcgcacgcggaaccacaggccgggtgcacgcaggcccaggtgcatgtcgtcggcaacgatggcgcggccgtcggcggtaagcgcgccggccaccgcgaagttgttgctgccgatgacgtcgccctcttcctgctcagtgcccgtttttcccttcaatgtgcgcaggtccagctggctggcatcgggcagggcggcgttgccggtgggttcgccaaacagcggcgcatcccattcggtgccgtcgtgggcgatcagcgcgtacagcgccggcggcaccactgcgcggatgcggctgagcgcaagctcggtctggttgccggggtcctgcaggtcggcatacatggccagcccggtcagcacgctgtcgctggcctgccacggttgtggtgattgccgcagcagcaggtaggcccatgggcgcacggagagatcggccaggccttcgttgacgccatccacgtaggcgcgcacggccgtgccgttgtcgcccagtgcggcctgcagattcgcctcggtgcgtgcacgcagccggtgcacgcgcatgcgcttgtcggcgtcgatggccttcggcccgaacagcgccgacagctcgccagcggcactgcggcgcatcaggtccatctcgaagtaacgttcctgcgcgtgtacgcggccgagcgcacgcatcgcgtcggcctggctgccggcagtgatggtgaccacgcccagcccatcgcgctcgatggtgaccggcttggccagccccggcagcgcatgctcgccgtccaggtcggccaggctgccgcgcagcagcagccacagcaccagtgcggtgaccagcacgatggcgatcaacacgcccagcacccaacgccatgtacgtcgcatcgcacgtcctttccgaactcgtgggccgattgtagccgcaggcgcaactgcgactgattccgattagatcaccgtattttgaaatgcggcaccctatgccgcatcgattcacaggagccccccatgaaaggcaacccggacgtcatcgcctgcctgaaggaactgctgcgcggcgagcttgctgcgcgcgaccagtacttcatccattcccgccgctacgaggaccagggcctgttcgcgctgtacgaacgcctgaaccacgagatggaagaggaaacccagcatgccgatgcgctgctgcgccggatcctgttcctgggtggcgacccggacatgcgcccgcatgccaccgagccgggcaagaccgtggaggagatgctgcagaaggatctcgatactgaatacgccgttcggaacaatctcgccgccggcatgaagctgtgcgaggagaagggcgattacgtgagccgcgacatcctgctggcgcagctgaaggacaccgaggaagaccacgcctggtggctggagcagcagctgggcctgatcaagcgcatcggcctggagctgtaccagctgagcaagatcgacggcaacggcgccccggcgcactgagcgggcatcgttttttgtagagccgagccaatgctcggctgccttccggtagagccgaccgctggtcggctgctctgcagaaagcagccgaccagcggtcggctctaccaggagccaaaagcagccgaccagcggtcggctctaccaggagccaaaagcagccgaccagcggtcggctctacctggagccaaaagcagccgaccagcggtcggctctaccagcagcacagcgttctgtcgcccgccagcaccggagcaccgccagccagccttcgcccgccagccgctccaccgcccgccagccgacaacgaaaaagccggggaatgccccggctttttcgtgcctggggtcagagccctttcccatggaaagggatccgaccccgtacctcttattccaccgacagcccttccaccttctgccagccgcgcggcagcaggtggccgcgggtggcacgggcgccgaggtaggcgtcgagctcgttgaacttcaggcccatggtgcgctggccgctgcgcacctgcagggtctgccccggactgatcgccacgatggcgaccacgcgttcggtggcgagcttggccttcgggatctcgatgatcttgttgcccttgcccttgtccagttccggcaggtcgttggcggcgatcgccagcaggttgccggagctggtcaccgccacgatgcggtcggtggccacgttggcgaccaccgacggggtcagtaccgacgagccggacgacaggttcagcatcgccttgccggccttgttgcggccgatcaggttctcgaagcgggtgacgaagccatagccatgactggaggccagcacgaagcgggcatctggctcggcactggccaaggtcacgaagctggtaccgggagccggcgagaagcggccggtcagcggttcgccattgccacgcgcggagggcagggtatgcaccggcgtcgagtaggcgcggccttcgctgtcgaggaacgcgacctgctgggtgctgcgcgcacgcactgcgccctgcagggcgtcgccgtcgcggtaggacagggcggaagcatcgacgtcgtggcccttggccgctcggatccagcccttctccgacagcaccacggtcatcggctcgctcggcaccagctcggtctcgtcgatggcctgcgcggcctggcgctgcaccagcggcgagcggcgtgcgtcgccgaacttcctggcgtcggcggtcagttcgtcgcggatcagcttcttcagcttggccttgctgtcgaggatgccgaggatcttctcgcgctccttggccagctcgtcctgctcgccgcggatcttcatctcttccaggcgggccagctgcttcagcttggtttccaggatgtactcggcctgttcctcggacaggccgaagcgcgcgatcagcgccgccttcggttcgtcctcggtacggatgatgtggatcacctcgtccaggttgaggaaggcgaccagcaggccttccagaaggtgcaggcggcgctcgaccttctgcaggcggtgctgcaggcggcgggtgacggtgttgctgcggaaggtcagccattcgctgagcagcatcttcaggttcttcacctgcggacggccgtccagcccgatcacgttgaggttgacgcggtagctgcgctccaggtccgtggtcgcgaacaggtggcccatcagctggtcggcgtcgacgcggttggaacgtggcaccagcaccacgcgcaccgggttggcgtggtcggattcgtcgcggatgtcttccagccacggcagcttcttggcgcgcatctgcgcggcgatctgctcgatcaccttcgacggcgacacctggaacggcagcgccgtcaccacgatgttgctggcctccttggtgaaggtcgcacgtgcacgcacgctgccgttgccggtctcgtagatgttccgcaggtcgttggccgaggtgatgatctcggcgctggacggatagtccgggccctgcacgtgctcgcacaggtcgcgcacgctggcatcggggttgtccagcaggtgcagcagtgcgctgacgatctcgttgagattgtgcggcggcacgtcggtggccatgcccacggcgatgccggtggtgccgttgagcagcaggtgcggcagccgtgccggcatccaggtcggctcctgcagggtgccgtcgaagttcggtgcccagtcggtggtgccctggcccagttcgcccagcagcacttcggcgatcggggtcagcttggattcggtgtaacgcatcgccgcgaacgacttcgggtcgtcgctggagccgaagttgccctggccctcgatcagcggatagcggtacgagaacggctgtgccatcagcaccagggcctcgtagcacgcgctgtcgccgtgcgggtggtacttaccgatgacgtcaccgacggtgcgcgcggacttcttcggtttggacgcggcattcaggcccagctcgctcatcgaatagatgatgcggcgctgcaccggcttcaggccgtcgccgatgaacggcagggcgcggtccaggaccacatacatcgagtagtcgaggtaggcgcgttcggcgtactcgcgcagcggcagttgttcgaatccgtggaacacggggcgggcaagttcggtcatgcggcgttgttacctgttgtcgggaggcggcgacggcggtcgccgctcgcaatcctgtgattatccggatgcggcgggggatgccaagccgcgcgcagggtccagcccggtttccaggccgtgcccggcccgtgccaggtagcgaccgggcggcagcccgaagtggcggcggaacacggtaacgaacgcgctggcgctgctgaagcccagcgcgtgggcgatgtcggccacgctgcggccgtcggtcagctggcgcagggcctctgacaggcgcgcctgctgccgccactgggcgaagctgagcgtggtctcgtcgcggaagtgacgggtcaggctgcgcggtgacagaccggcccaatgcgcccattcggccaggctgcgttcgtcggaggggtcggccagcaactgcgaggcgatcttcagcaggcgccggtcgtgcggcatcggcaggtgcatgcgctggcgcggcgcggtgcggatctcgtccagcagcacgtcgatgatgtgctggcgctcgggcgtggtgtcatggccgagcggccattcgcagatgcggtcggccagcgcctgcgccagcttggacaggcccagcacgcagggatcggcgggcagggtggcgcaggccggtgcagccagtgccatgccccagccgcgcaacgggccgtcgagggtgacggtgtgcggttccagcggcggcatccagccggccgagcccggcgccagcgaccacgtgccatgcgaggtgcgggtggtcagcaggccgcgttcgacgcagatcaactgggcacgctggtggtggtgccagtcgacctcgcgggccaggccctgctggctgtcgaagcggaaggcgatgaccggcgggccgtcgttgcgctcgaaccagtccagtgcctcatctctgagtaggcgtttgggaacctgaatttctgccttgttcatcatgtccgctggctgaaatgtgacatccattggctggattgtactaccgggccacctgaccagatcattaaggtaggcgccttcactgatcgagcccgctgctgcaacacagcattcgatgccagatcgaatatttccattgagaaatattttttttggaagagaatgctcccccatgatctgtcctgcaaccactccccccagcttcggcctgctgctgcgccaggtgcgcgacggcctggtgcgccaactcgacgcgtccatggcggaagaagatctgggaatcggcttcacccattacatcgggttgaaggtgctttcccacatggcgccctgcaccgccaacgaactggcccaggccatcgaccaggtgcccagcgcggtcacccgcctgctggacaagctggaggcgctgggctgcgtccgccgcgaggcgcatgcgcaggaccggcgggcactgcagatcgtgctgaccgacgaaggccgtgcgttgtgggcgcggctgaagctgcgcggcgacgcggtgatggattacgcgctgcgtgatctttccgccgacgagcgcacgctgctgctgtccctccttacccgaatccgcgattcactgacgaccccatgaacccgatcccgcattccactctccgccggtccgggcgcgcgctgctggtgtcagcgctggcgctggccctggccgcctgcgccagcagtcgtggcctcaacccgcagggccacgtgcttgacgtggacagcctgcacagcgaacgcaccctggctgacaccgacctgagcgccgccggcttcccggcgcaggactggtggaaggcactgggcgatgcgcagctggacgcactggtcgccgaaggcctggccggtcatccgagcctggacgccgccgacgcgcgcctgcgccaggcccaggcccaggtcggtaccgcgcgcgccgacgagctgcccagcctgtcggtgtccggcggctacaccggcctgcgcctgcccgagtcgatggtcggcagcgagatgggcggccgctatggcggcagcagccaggtcgccttcgatttcagctacggcgtggacctgtggggcggcaagcgcgctgcctgggaagccgccgtggatggcgcgcatgccgccaccgttgaagcccaggccgcacgcctgaacctgtccaccggcattgcccaggcctatgccgacctggcctacgcgtggcagctcaacgacgtggccgaggaagaactgacccgctcgcagaaatcgctgcagctgacccgccagcgccgcagcgccggcatcgacagcgatctgcaggtgcgccaggccgaggcccgcgtgccggccgcgcagcagcaggtgctggccgcgcagcagcgcatcgacgccgcccgcaccgcgctggctgcactggtcggcaaggggccggaccgtggcctgtcgatccagcgcccgcagccgttgaacccgatggcactgcagctgccgggcgtactgcccagcgaactgctcggccgtcgccccgacatcgtggctgcgcgctggcgcgtggaagcggccgacaagcagatcaaggtcgccaagaccaagttctacccgagcttcaacctgaccgcgctggccggcgtggtcgccccgaacgtgggtgacctgctgaagagcagctcgaccttcgcctacatcggcccggcgttgagcctgccgatcttcgaaggcggcaagctgcgcgccaacctggccaacaccgacgcgcagtacgacctggcggtggccaactacaaccaggccgtgctcgatgcactgcgcgacgtcgccgaccaggtcaacgcggtgcgctcgctggcgcagcaggcgcacgcgcagcagcaggcagtggacaccgcacgctcggccttcgacctggcccagcagcgctaccgcgccggcatcggcagctacctggacgtgctgaccgcgcagtccaccctgctgcagtcgcagcagcagctggccggcctgcagtcgcagcaggtgcagacctcggtgcgcctgagcaaggcgctgggcggtggtttgcagcccgccgacaccgaccgcgcaccgatcgcctcccattccgattcctcgcattcctgaagacttccgccatgagccagacccaagacactgcggccccggccgcccccaaccgccgcggcaacctgctgcgcggcctgttcgtgatcgtcgtgctgctgcttgccgcactggcgctgtggtacttcatgttcggccgttggttcgaagaaaccgacgatgcctacgtgcagggcaacctggtgcagatcaccccgctggtggccggtaccgtggtcgccatcaacgccgatgacggcatgcgcgtggagcgcggccagctgctggtgcagctggacccgtccgacacctcggtggcgctgcagcaggccgaggccaacctggccaagaccgtgcgccagacccgtggcctgtaccgcagcgtggaaggcgcgcaggcggacctgaacgcccgccaggtgaccctgaagcgcgtacgcgaggacttcgcccgccgcaaggatctggccgccactggcgccatttccaacgaagaactggcccacgcccgcgacgagctggcggcggccgaagcggccgtggccggttcgcgcgagaccgtcgagcgcaaccgcgcgctggtcgacgacaccgtgatcgccacccagccggacgtgcaggccgccgccgcgcagctgcgccaggcgttcctcaacaacgcccgcgccggcatcgtcgcgccggtcaccggctacgtcgcccgtcgttcggtgcaggtgggccagcgcgtgcagccgggcaatgccctgatggccgtggtgccgaccgagcagatgtgggtcgaggccaacttcaaggaaacccagctgcgccatatgcgcctgggccaggaagtggagctgaagtcggacctgtatgccggtgacgtgaagtacaagggccgcatccagagcctgggcctgggtaccggctcggcgttctcgctgttgccggcgcagaacgccagcggcaactggatcaagatcgtgcagcgcgtgccggtgcgcatcgccatcgatgccaagcagctggccgaacacccgctgcgcatcggcctgtcgatgaaggccgaagtgagcctgcgcgaccagaagggtgaagtactgccgagcaccccggccaagggcaccgtgttcgacaccgacgtatatgccaagcagctgcatgatgccgatgaggtgatccacacgatcatccagggcaacctgccgcagcaacaggcaaaggtgggctgaggtcgccatgtccgcacaagctccagccgcacccggcgctccgggtgcaccggcggcgccgggtgcggcctccgggttcctgccacccagcgtcgccctgtgcaccgtgggcctggcgatggcgtcgttcatgcaggtgctcgacaccaccatcgccaacgtttcactgccgaccatcgccggtaatctcggcgccagctcgcagcaggcgacctgggtcatcacttcgttcgcggtcagcacggccatcgcgctgccgctgaccggctggctcagccgtcgcttcggcgagcgcaagctgttcgtctgggccacgctggccttcgtcatcacctcgctgctgtgcggcctggcgcagagcatgggcatgctggtgctgtcgcgtgcgctgcagggtttcgtggccggcccgatgtacccgatcacgcagtcgctgctggtctcgatctatccgcgcgagaaacgcggacaggcattggcgctgctggcgatgatcacggtggtggcgcccatctgcggtccgatcctcggtggttggatcaccgacaactacagctgggagtggatcttcctgatcaacgtgccactgggcatcttcgccgcgctggtggtgggcaaccagctgaagggacgcccggagcagatcgagaagccgaagatggactacgtcggcctggtcaccctggtgatcggtgtcggtgccctgcagctggtgctcgacctgggcaacgacgaggactggttctcgtcgatgaagatcgtggtgctggcctgcgtggcggtggtgacgctgacggtgttcctgatctgggagctgaccgacaaggatccgatcgtcgacctgaagctgttccggcaccgcaacttccgcgccggcacgctggcgatggtggtggcctacgcggcgttcttcagcgtggcgctgctgatcccgcagtggctgcagcgtgacatgggctacaccgcgatctgggcaggcctggcgaccgcgccgatcggcatcctgccggtgatcatgacgccattcgtcggcaagtacgcatcgcgcttcgacatgcgcatgctggccacggtggccttcatcgtgctgtcgatgaccagcttcctgcgttcgaacttcaacctgcaggtggactacatgcacgtggccggcgtgcagctgatcatgggcatcggcgtcgcgctgttcttcatgccggtgctgcagatcctgctgtcggacctggatgggcgcgagatcgcggcgggctccggcctggccacgttcctgcgtacgctgggtggcagcttcgcggcgtcactgacgacgtggctgtgggcgcggcgtacccaggtgcaccatgccgacctgaccgagcacatctcggcctatcagcccggcatgcaggaccaggtgacggcgatggggcagggcgacctgcaacacggtgcagcggtactgaacaacatgatcaaccaccaggcatcgcagatgggcttcaacgacatcttcttcctgctgggctggatcttcctggcgatcatcacgttcctgtggctggccaagccgccgttcggcgcgggtgcaggtgctgccgccggcggcgggcactgaccgttcattgctgttgaaacgcagaaaccccgccgcaaggcggggtttttcttttggtggatccacgccacgcatggatggatctcggggcgtgaattcccagaccccggaaacgaaaaaacccgctttcgcgggtttgatcatcttgagtcgtggtgcccaggagaggactcgaacctccacggttttacccgctagtacctgaaactagtgcgtctaccaattccgccacctgggcgactcaggagatgaattatggggagccacagaagatgtgtcaacaacatttcacacttttttctggggctgcacgcccaggtgatgcagcaggctgcgcatcgccgatgacagtcgtgtccactcggcaaagcacgcgcacaggcgtcgttgcgcccacgcatcggcgagcggtacggcgacggtgtgcgtgctgcgccgatgctggcgcgcgatggtccgcggcacgatgccgacgccgatgccgtggccgaccatgatgcacacgccttcgaaggtcttcatgcggatgcgtacatccaggcggcgcccgatgtcgcgcgcctggtcctcgatgtaggtctgcagtgcattgccgtcggccagggcaacgaaggtctctccggcagcctcggcaaaagccaggctgcgccgggtcgcgaagcggtggtcggccggcagcagcatcaccaggggatcttcggcgaccacatgctgctgcaggccggcagcgtcgaccgcatcgctgatgatgccggcttcggcctggccggcactgatcgcgcgtacgacttcggggctggtgcgctccagcagttccacatgcaggcgtgggcgtccggccagccacggcgcgagccgcgagggcaggtagttggtcagcgcggcggtgttggcatacaggtgcagggtgccgcgcgcaccctgcgcgaacgcctgtagttcgccacgcagctgtgcctgctgctgcaggatcaggcgtgcgtggtgggcgagggcggcgccggcctcggtcaggctgacgccgcgtgggtgccggtgcaacagcgcggtgccggcatcggcttcgatcgtgcgcaggcgctcgctggctgaacccaatgccaggtttgcctgtgccgcgccggcggtgatgctgccggcttcggcgattgccaggaacaggcgcaggtcggcgatgtccatccgcatgtcgtgcctcattgctgatccggcgccttcgggtcagccgaaggctgggccgggaagaccgcattgtgcgcctggcgagggcccggtccaatgaagccatgcatgaatcgacatacttctatttgctgctggtggtggtgttcgtgctggccggcgtggtcaagggcgtgacagggatggggttgccgacggtggcgatgggcctgctgggcagcaccctgtcaccggtggcggcggcgtcgatgctgttcattccaaccttcgtcaccaatgcgtggcaactgctgtccgggccgtcgctgggccacatcgtgcggcgtttgtggccgatgatgcttgccgtggtggtggtgacgctgggttcggccgcactgctggtgcgggtcgatcgcacctggtcgcgcgttgcgctgggcgtggcattggtggtctatgccgcctatgcgttgctcgcgccggtgttccgcgtgccgcagcggcgcgagcgctggctggggccgctggtgggtgcgctgtccggcgtggtgacgggggcgacgggtgtgttcgtgatgccggcggtgccgtacctgcagtcgctgggattgcagcgcgaggagctggtgcaggcgctcgggctggcgttcaccgtgtcgacgatttcgctgaccaccggtctggtgctgcacggtgcgttcggcatccagcagctggggttgagtgcgctggcggtgctgccggcgctgctgggcatgtggctgggccaggtgatccggcagcgcatcagtgcccgcgtgttccgcgcctgcttcctggggttcctgctgctgctcgggctggaactggtgctgcggccgttgttctgatgccggatccggggcatgaaaaaacccgctttcgcgggtttttctcattctcgacgtggtgcccaggagaggactcgaacctccacggttttacccgctagtacctgaaactagtgcgtctaccaattccgccacctgggcgtcgaggagcgagattatggggtgccgtgacgggggtgtcaacactttttgctgatcccgggtcggttgccgttgcgcatgcgaaacgggctctgccccccatctcactcgcttggggccagagccctttcctctggaaaggaatccgaccccggctgccggatcacaggcaaaaaaaatccccgccgaagcgaggagttttttcgttggtgcccaggagaggactcgaacctccacggttttacccgctagtacctgaaactagtgcgtctaccaattccgccacctgggcgttccagaggcgcaattgtgaagatgaatccgcaggctgtcaacgacttcctgaatgtttttgacgcgatcgcttgaaggcgaccgctgacccgttctgcacgccgccagcggctaccatgtagggcgatgactaccaaaaaaccaagcaagggcgggagcaagtcccgcagccaggccccgaacaagggcgccaaggcgggtgcagcccgcaccaccaagccgggcaagccgctgccgggctggttccccgaattgaatgaaggcggtgcaccgccacgcggccgcaaggtccgcagtaccgatgcaccgggcccggccccgggccgcaagctgccgccggccggcaaggtgatcgacgatccctatgccgcccgcgaagcggagaagtacgaacagcccatcgccagccgcgaggccatcctggccctgctggagcgctgcgaagggccgcagaccgccgaggaactgggcgcgcgcctgggcctgaccgctccggaccgggccgaggcgctgtcgcgccggctcggtgcgatggtccgcgacggccagctggtgcagaaccgtcgcggcggtttcgccccgatccagaccctgaacctggtcaccggtgtggtgatcgccaacccggaagggttcggcttcctgcgcccggtcgagggcggcgacgacctgttcctgccgccttatgaaatgcgcaaggtcatgcacggcgacaaggtgctggcccgcgtgaccggcatcgatcaccgcggccgtcgcgaaggcagcatcgcccgcgtgctggagcgcggcatgacccgcctgatcggccgcttcagaatcgagatgggcatcaactacgtggtgcccgacgacaagcgcgtgcagcgcaacgtgcaggtgccgccggaccagaccggtggtgcgcgcgacggccagctggtggtctgtgaactgacccaggcgccggacagccgccgcccgccgatcggccgcatcatcgcggtgctcggcgacaagctgaccgcgtcgctggtggtggagaccgccatccatggccacgagctgccgttcgagttcccgcaggaggtgctggacgaagcggcctcggtgccgctggtggtcgagccggcgatgattggcgaccgtgtcgacctgcgcagcacgccgctggtcaccatcgatggcgaggatgccaaggacttcgacgacgcggtgtactgcgagccgaatgccgagggtttccgcctggtggtggcgattgccgacgtctcgaattacgttcgccctggtacgccgctggatgaagaggcgcagaagcgtgcgacgtcggtgtacttcccgggcttcgtggtgccgatgctgccggagacactgtccaacggcatctgctcgctgatgccgaaggtcgaccgcatgtgctttgtctgcgacatgcagatcgaccgcgatggcctggtcgcgcattcgcgcttctacgaggcggtgatgaactcgcatgcgcgcctgacctacacccaggtgtggaaggcggtgggcgaggacgatgccgataccaaggcctggatgggcgacctgctgccgcaggtgcagcgcctgcaccagctgtacaaggtgctgtccaaggcacgcgccaagcgcggtgccatcgaattcgaaagcagtgaagtgcgcttcgtgctggacaaccgtggtgaagtgacccaggccggcatgctggtgcgcaacgacgcgcacaagctgatcgaggagtgcatgatcgcggccaacgtcgaggccgccaggtacctgctgtcgcgccatgtgccggcgccgtaccgcatccacgagaagccgccggaaaccaagtacgccgacctgctggaattcctcaaggagttcaagctgagcctgccgccgtggtcgaaggtgcgcccgggcgattacaccaagctgctgaagaagatccgcgaccgccccgatgccacgctgctggaatcggtgttgctgcgcagccagagcctggcgatctacagcccggagaatcacggccacttcggcctggcgctggaggcgtacgcgcacttcacctcgccgatccgccgttaccccgacctgctggtgcaccgtgcgatcaagcatgcgttgtccggcaagccgctggacaagttcacctacaacgcgcgcgaaatggcggccctggcgctgcagtgttccgagcgcgagcgccgtgccgacgaagccgagcgcgaggtcgacgagcgttaccgcgcggcgtggatggaaaagcacgtgggcggccagttcgacggcgtgatcagcggcgtgacgagcttcggcctgttcgtggaactggacgagtccaaggtgcagggcctggtgcatgtgacccagctgccgcaggactattacaagttcgacgccacccgcaagacgctgaccggcgaacgccgcggcagcagctaccggctgggtgaccgcgtgcggatcctggtgctgaaggccagcatggaagagcgcaagatcgacttccgcctggtcgagcacaagggcgaggacgagggcgatggcctgccgccgccgcccgagcggggcaagccggccaagcgcaccaagaagaagtattgaaaggtgtgccgaccaacggtcggcacctaccgcaactggtaggtgccaaccttggttggcacgacgttccggaggaaccccagcatgcaaggccaacccgaatacagtggcggctgccagtgcggcgcggtccgcttccaggcgcgtggcgagctcaccgacagctcgatctgccattgccggatgtgccagaaggcgttcggtgcctattacgcgccgctggtatccgtgcgcggcgtgcagttcagctggacccgcggccagccgcgctatttccagtcgtccaacgtggtgcggcgtggtttctgcgccgactgcggtacacccctgacctatgaagccccggatggcgtggccgtggctgccggcgccttcgatgagccggaacgcctgccaccgacgatccagtacggggtggagcgcaagctgccgttcgtcgacagcctgtccggcctgccggcgcggcgcaccgaggacgacgtcgccgcgctggagttcctggccaccatcgtctcccaccagcaccccgaccacgacaccccgcactggccgccgcgcagtcggtaacgcccctctagcgccgagcccacgctcggctgctccgggttcaggcttcatcggccccccgccagccgagcatgggctcggcgctacagaggggcggccggtcgcagcgcccggcctgccgatgctctaccatagccaccccctttccggtccccgcccgcatgagcaagaacagccagtggattgtcggcgtcaacgccgtcgcctcctccatcgagaacgacgccgagaacgtccgcgaagtgctggtcgaggccggtgcgaagaacccgcgcctgaccgagatcgaagagaacgcccgccgcaagggcatcgatgtgcgcaaggtgaacagccaggcgctggacggtgttggcggttcggtgcgccaccagggcgtggccgcgcgctacgccgccgcccgtacctacagcgagaacgagctggaagggctggtcaccgcggccgagggcaaggccctgctgctggtgctcgacgaggtgcaggacccgcacaacctcggcgcctgcctgcgctcggccgctgccgccggggcgaccgcggtgatcatcccgaaggacaagtcggccacggtcaatgccactgtgcgcaagacttcggccggtgccgccgacctgatcccggtggtggcggtgaccaacctctcgcgctgcctgaaggacctgcagaagcagggcgtgtggatctacggcctggccggtgaagccacggcctcgctgtaccagctggacctgaagggcaacatcgcgctggtgctgggcggcgaagccgatggcctgcgccgcctgacccgcgagaactgcgatggcctggtcaagatcccgatgccgggcgagatcgagagcctgaacgtctccgtcgccgccggcgtcagcctgttcgaggccgtgcgccagcgcggttgatcggccagcgcgatgtgatcggggtcagatcccttttccaatgggaaaagggatctgaccccgtttcatgtcccgcctcaccccgcgctgccgcccaacgccttgaacagcgtcacgtcgttgttgagctggccctggcgcgcacgtgccagcgacagttcggcatcacgccgggtctgctgcgcttccagccaggtgcgcagatcggtggcacccacgcggtaacgcacttcctgcgcgcgttccacttccaccgcttcgtcgtatgaagcctgcgaggccgccacctggcgcgccagctgctcgcgcgccgacagtgcgttgtccacttccgagagcgcggtatacagcgtcttgcggaagttgctggcggcgatctggtaggcggtggcggcgatatcggtatccagctgcgcacgctgcaggttgaggaacggcagcgacaggccggcgcccagcgtggccaccgggttgcgcagtacatcgcccagcgaggtcgcgctggaaccgaggctgccggtcaggctcagcgcagggtagtactgggtggcggtgaccttgatggtcttcaggctgttgcgcaggcgaagttcggccgcgcgcagatcggggcggcggccgagcagatcggtcggcaggccttcgctgatggctgggctgcgtgcgcccagcaggtcctgtggttcgtcctgctggggccagggcgtgccgtccagcagcacggtcagcgcgttgcgcacctccacccgctgctgttccagcgcgctctgcaaggaccgctgcgactgcaggttctgcagtgcctggcgcacttccaggcgcgataccgcaccggcgtcgaagcgggcctgcaccagttcgcgggtgcgttccaggcgctccaggttggcctggccggtggcgatcgactggttgaggtaggccaggttccagtactgggtgatggtgtcgctgatcaccagcagcgcggtgttctgccggtcttcctcgctggcctcggcttcccagcgggcgatgtcgcgctgggtgcgcaggcggccccacaggtccacttcccaacccagcgagacgccggtggaatagctgcggcgccaatcatcagactggtcggtggcgcggctggcgctgccgctcacgccggatgacgagggctgcggccacagtgcgttgctggccaggccggcctgcaggcgcgaacgctgcacggccaggccggcggcggccagatcgctgttggcggccagcgcctgcgccaccaggcggtccaggcgttcatcgccgaagccggtccaccaggtgtcctggcggatgtcgcggcccggtgtatccaggctgctgcgcgggtcatcggctggcgcgttgagggtggcatcgccacgtccatactgcgccgccacggccgggtcgtgcaccgggtagcggccgaccgacgcgcagccggacagggcgagtagaacggcaccggccagcagcaggtgccggggagcggggaagggcagtcgggtcatcatcttcattcgcgggccagggcctccaccgggtcgagctgcgcggcgttgcgcgctggcaggaagccgaacgcaacgccgatcagggtcgagcaggcaaacgcggcgacgatcgaggcggtggagaacagcacctggaagtcgctggcgaagcggccgatcatcgagcccagcagcagggccaggccgataccgagcacgccgccgagcaggcagaccagcaccgcttcgatcaggaactgctggcggatatcactctgccgtgcaccgacggccatgcgcaccccgatctcgcgggtgcgctcggtcaccgataccagcatgatgttcatcacgccgatgccaccgaccagcaacgcgatggcggcgatggcaccgatcagcagggtcatcgtgcgcgtggtctgctcgatggtctcgcggatctcggcgctgttgctgaggaagaaatcctcggtgccatggcgcagggtcagcaggcgggtgatcgcttcctgcgcggcgtccatcggcgtgtcatcgtccacgcgcacggtgatgctggacacgtggctctggccgagcatgcgcgacatcaccgtggtgtacggcacccacacgctgaggctggtgctgccgccgaagccgaaactctgccgcttggccacgccgaccacgcgcgccggcacgttgccgagcaggatcacctggccgaccgggtcgacatcgggaaagaactgggactgggtgttctcgtcgatcaccgccacctggcccaggcccttgaccgcatcggcatcgaagaagctgccgctgagcagggtcacgcccttgacccggaagaactgctcgccaacgccgctgacctgggcggtggacgactggttgcggtaacgcgcggtgaccgaagtcgatacgctgggggtggcgctgtctacgtagctctgccttgccagtgcatcggcatcgctggccttgagcgtctgtacgcgcgccgagcgcatgtcgccgaaaccgcggccgggatagacgtcgatggtattggtgccgagcgcgctgatgttctgcaggatctgctgctgggagccattgcccagcgccaccaccgagaccaccgaggcgatgccgatgatgatgccgagcatggtcaggaaggttcgcagccgatgtgcgttcatcgccagcagcgccatgcggaacgcttcggtgaagcggtcgcgcgcggcccgccagctgttgccgcgggcgacgccggtactggcctcgcgctgcgcacggtaggtcggcgcattcgggttggcgcggtcggcgatgatctcgccatcgcggatttcgatgatgcgctgcgcgtgctcggccacgctcatgtcgtgggtgacgatgatgatggtgtggccttcggcatgcagttcgccgaggatcgccatcacttcctcgccggatttcgtgtccagcgcgccggtcggttcgtcggccaggatcacctcgccgccgttcatcagggcgcgtgcgatcgacacgcgctgctgctggccaccggacagctggcccggcttgtgatgcatgcggtcgctcaggcccagccgctgcagcagttgctcggcacgcgcgttgcgcaccgggccggggctgccggcgtacaccgccggcacttccacgttgccgcgcgcatccaggtcgccgagcaggtggtagcgctggaagatgaaaccgaaatgctcgcggcgcagttcggccagttcgtccggttgcatcttcccggtttcgcggctggccacctggtagctgccacgggtgggacgatcgaggcagccgaggatgttcatcagcgtcgacttgcccgagccggactggccgacgatggccaccatctcaccggcgtggatgtcgagattgacgtcgcgcagcacggcgatcacatcatcgccggccgggaattcacgtcgcaggtcgcgcaggcgcagcagcggcgccgtcgtgctcatcggcgccccatgcccgggccgccaacccgcatctgcatgccgccgcggttgccgccgccggcgctggcaccggccgcacccgcttcgccaaccaccacgcgctcgccttccttcagcccggacaggatctcggccgaggcgccattgttgatgcccaccgtgaccttgcgcggctgcggctggcccttgtcgtccagcacccgcaccatgcgctcgtcgccacggcgcttcggccccagcgccactgccggcaccatcagcacgcccttggcctgcttgagcagcaccgagacctgcgcggtcatgtcgatgcgcagcgtgccatccgggttctccacgtcgaacagcgcgttgtagtagaccgcgctgctggaactggaactggaggagctgctggagctggatgaattctcgttggcgatcgaggctggcgccggattgatctggcgcagcgtggcgtggtacttgcggtccgggtcgccgagcgtggtgaagtacaccggcatgccggccttgatcttgaccacgtcggcctcggagatctccgcattgacggtgaccacgtccagccgcgccagcatgacgatggtcggcgcggtctggttggcgttcaccgtgcggccttcctcggccaccaccgccaccacggtgccgtccatcggcgcggtaatgcgggtgtaggccaggttggcgcgggcggtgcccagctcggtttcgcggcccttgatctgcgcctcgtaggactgcagctgggcacgggcggtcttcagctgcgcctcggcggcatcgtattcctggcgcgaggtggcctcggcggccagcatctgctgctggcgcgcgaattccagttcggcctggcgcagggtggcctgctggacggcgcgctgggcggtgacctggtccagcgaggcctgcgcgttgagcacctggttctgctgggtggtggcgtcgatctcggcaatcaggtcgccttccttcacggtgtcgcccagctgcaccttcagcgacttgatctggcccgaggcctgcgcaccgacgctgaccagcttgtaggcatcgatcacgccggtggcgtccaccgtctgctcgatgtcaccgcggctgaccggcgaggtggccaccgccggcgcggcgggcttgcgcagcagccaccaggcggtcgcggcgacgatcagggcaagcagggcgatcagtatcaggcgactccggcgggtcgcgggcagcaggcggaacgtcacgtcgtggcttcactctcggggccgcgcgtgcggcgttggcgggcattgtgaagaccgggcgatggacggctcaatcctcggggtatgtctgtatgtaacactgtcggtgaatacgcgtaaccacaggtatcccgcccgtgggtggatacactggtacgcattgccccggatgcggttcagctgccgacacgggatgatcgcgacatggagactgaaaacccgatgcatcgactgctgatcgtcgacgacgacaacgacatccgcacgctgctggccgagcagctcggccgcgccggttacctggtgagcacggcggccgatggcaccgccatgcgccagctgctggaccgcgagcacgtggacctgatcgtgctcgacctcaacctgccgcgcgaggatggcctgaccctgtgccgtgacctgcgtgcgcgttcgaacacgccggtgatcatgctgaccgcacgcgccgagccgatcgatcgcgtgctgggcctggaaatgggcgccgatgactacctggccaagccgttcgaaccgcgcgagctgctggcacgcatccgcaacgtgctgcgccggaccgaggcgctgccggccaacctggagccgctggcggtgcgccgtgcgcgcttctcgcgctgggtgttcgacctggagcatcgccacctggtcgatccggatgaccgcgtggtggtgctgtccggcgccgagttccgcctgctgcgggtgttcatcgcgcacgccaacaaggtgctgtcgcgcgagcagctggtcgcgctcagcagtggccgcaactacgaggcacaggaccgcgcgatcgacctgcaggtcagccgcctgcgcaacaagctgggcgacgacggtggcccggacggactgatcaagaccgtgcgcaacgagggctacgtgctggcctccgcggtcaacctggaataagccgcgatgaagcgcctgcgccatttcctgtcctcgatggtcgggcggttgttcgtgatcctgctgctgggcatggcggtggctgcgatcggcgcgaccatgctggccacttccaagcgccagcaggagttcgagcggcagaacctgaaccgcatcgccgaccgcctgcagggctacgtcaacctgctggacggcaatccggagctgcgcgagcgcctgctggcgatcggcgggccgagcgtgcgcgcgctgcagcccggagcccgcctcgggcgtgccgacacggcgctgatggaagtgctggaagaccgccccggaccggtgtcgcgcgcgcatgtgcacttcgcttcgttccgctcctgcattcccaagctgcaggacctgctgccgccgccaccgccgggtcaccggcggccgccgcgcgaacgcgacccggcgttcatcccgcccaagtgccgcgcggtggacgtgaccctcaacgacggcacgctgctgaaactggcgctggactcgccggcggtggcgcacaacggcatcctcgccgtggacccgtggttcctgaccctgctggtgctggcgattgccgtgctggcctatatcgttgcgcgcatggccagtgcgccactgcaggaactggccgccgctgccgaggatctcggcgacgatctgcagcgcgacccgttgccattgcgcgggccgcgtgaagtgcagcgcgccgccgaagccttcaacgccatgcagcaccgcctgcagcggcacctggccgaacgcacgcagatgctggcggcgatcacccatgacctgcagacgccgctgacccggttgcgcctgcgcctggagaatgtcagcgacgaagccctgcgcgagcgcctgatcggtgacctggcggcgatgcaggcgctggtgcgcgagggcctggaactggcccgcagtgccgagagtgccgaacagcgcgccgcactcgacctggattcactgctggagagcatcgtcgaggacaccgccgaaggcggcgccgacgtggtcttcgaggggggcagtggttcggtgctgatgctgcgtccgctggccatgcaccgcctgttctccaacctggtggacaacgcggtgatgtacgcgcaacgggcgcgggtacgggtcgagcgcagcggcggtgcgatcaccgtagtggtggccgatgacggccccggcctggccgaagagcagctggaggcggtgttcgatccgttcgtgcgggtggaaacctcgcgttcgcgccagaccggcggggccggcctgggcctgaccatcgcccgcgccctggccgagaaggacggcgtcgcggctgtggctgcgcaaccgggccgaaggtggcctggaggcggtggtgcagtggccggccagtgcccaggtggtggcgcccggccgcgccggctgagctggcgggccgcggacggtgacgccggggccggggtttggcctatcatctgcccatctccccagtctcccctcgatgagccagcccgttcccgccggcatgccagtgcgcgctgcccggctgttcccgcacgctgccgcgccctgcagccgcacctggccgccgctgctgcggtgatgggcgggcagggggacgaggggcgctgggtggagcgccgcgcatcaggattcaggcgggcactgcggcagggcctgctgtggttgctgctggccctcgcgctgccgctggcggcacaggagggcgcgcccccgctgcgcgactacgccatcgatgtatggacctcgcgcaacggcctgccgcacaactcgctgcgcgacatcgcacagacgccggagggccacctgtggttcgccacctgggaagggctggtgcgctacaacggcctggacttcaccgtgttcgaccgcagtacgcgcccgggcctgcgcgacaacggcatcggcgcactgttcgtcgaccgccagggcgggctgtggatcagcgattcgcgcggcaacgtcagccaccgcggcagcgacggccaatggcgggtctgggagcaccaggccggtacaccgcaggtgctgatccagtccatgcagatggacagccagggccggctctggctgctgtacgaaggcaagggcatcggctacctgacgccggatgccggcatcgtctaccaggcaccggcggcggacctgccgatggcgatgagcttcaccaagctggtggtcgatgcacaggaccgggtatgggtcggcacgctcgacgggctggtgctgcgcgacaacgacggcgtgctcaagcgcgcgcccgccgcgtgggggctgggcgccggcagcggcctgtcgtggccgtaccgggcaccggatggcgcgctgtggatcgtcgccggcgagcgcctgtaccgggtggaggacgaccagctggtgctggtgcaccgcctgccgggccagctgcacatgacctcgatgctgcaggaccggcatggcgatctgtggctgggtaccgagaaccagggcctgctgcgcatttccgcccatggcctggagcggctgccggccggcctgaacctgccgggcggacgcgtggtcagcctgcgcgaggatgccgaaggcagcatctgggtgggagccaatgggggcctgtaccgcctgcgcgaaacactgttcagcagcttcaccgagcgcgatgggctcagtggcgactacgtgcgcacggtgttcgaggatcgcgaccgccagctgtgggtcggcagcgccagcggccttgacctccagacccgcgacggtcgtttccgcgcggtgccgctgcacaaccgcggcggcaaggcgccctcggtactgagcctggcacaggggccggacggtgacctgtgggtgggaaccttcggcgacggcgtttaccggctgggtcgcgatgggggcctgcgccacaactatgcggcggctgacggcatgccgggcggcaacatccgtgcgatcaccgttgacccgcagggcgtggtctgggccggcacgcagaagggcgtggtgcgcatcgacggcgaccgggtgcaggtctcgaacgtgccgggcatgcccggcggcctgatcaccgcgctcgagcatgatcaccagggcaacctgtggatcggcaccatcgaaggcatccgcgtgctgcgtggcgaccacgtgcagtcgatcgacctggccccgctggggggcggccgcagcgtgttcggcttccaccagctgggcgatgcgatgtggatcagcagtgatcgtggcctgtaccgctggcgcaacggtgcgctggcgcgggtcggcctggagcagggcatgccggtggacgcggtgttccagctggtgccggaccgcctcggcaatgtctggatcagcagcaaccgtggtgtgctgcgcaccgacatggctaccctcaatgcggtggccgatggccgcacgccgcgggtggtgctggagcgctacaacgagatcgacggcatggccaatgcacaggccaatggcagctccagtccatcggcgatcctgcgccaggatggcacgttctgggtggtcaccgccggtggcctgagcacggtcgacccgcaacgcctgcagcgtttccgcgagcggccatcgccgccggcggcgatcgagagcgtgcaggtggatggtgcgccggtgcactgggagggaccggatcgcaattacattcccggtggccgccggttggcggtgagctatgtcggcctgagctacctgatgtccgaccggatccgctaccgcacgcggctggatggcctcgatgccggctgggtcgagcgtggcccgcagcgcagcgtcgagttcgttggcctgccgccgggcgactacaccctgcatgtggctgcggcgcatccgggcggcagctggggccaacaggaggcggtgtggagcttcagcgtcgagccgttctggtggcagcggcgcagcgtgcaggcgctgggcgggctgttgctgctggccggcctggtggcactgtaccgcctgctgctgcagcagctgaaggccagcaacctgcgcctggcgcggcgggtggacgacgcgaccttcgacctgcaggccaagaccgtgcacctgcaggcgctgaaccaggaaaagaccgagctggccgaacgcctggcgcgccaggccgaagccttcgagcgccaggcccgcgaggatgcgctgaccgggctggccaaccgccgcggcttcgacgagacgctggcgcgtgacttcgcccgttcgcagcgcagtggtcatccactgtgcctggtggtgctggacatcgaccatttcaaggacgtcaacgaccgccacagccacagcatcggcgatgccgtgctggtgcaggtggcgacgctgatcgcagccgccagccgcgactccgacctgccggcgcgaaccggcggcgaagagttcgcgctgctgctcaacgacacccgcctggaggaagccgcgcagctgtgcgcgcgcctgcgcggcctgttccatgaccaccccgactgggccggtgtggaaggcctgcgcgtgaccttcagtgcggggctggtggagctggatgccgacgaccgcaccccggcgctgctgtaccagcgcgccgaccgcgcgctgtaccgcgccaagagcgacggccgcgatcgcacgagcattggttgatcgcatccacgcatggcgtggatctactgtgcggcgattgattcgccaccatgcatcgatggaacgacgtcggcctgtagagtcgagccgtgctcgaccaccgcgcggcagcgcggaaaaaggtgcagccgagcatggctcggctctacagaaagcgctttcttaccgcggccaggcgttggcgatggtgcagaacagccgcgcggtctgctcggtgtcatataccgcgctgtgcgcttcattcgcatcccaacccagcccggcggcagtggccgcacgcgccagcacggtctggccgtaggcgataccggccagggtgaccgtgtcgaacacgctgaacggatggaacgggttgcgcttgtggccggtccgcgccacggccgcgttgacgaagccgaggtcgaaatgggcgttgtggccaaccaggatcgcgcgctggcagccgtacttcttcatcgccgcacgcaccggagtgaagatgtggtccaacgccgctttttcttccttggccagccggaacggatggtcgaggatgatgccggtcacttccagcgacttcgggtcgatctccaggccctcggccgggaccacgtgggcactggcggtctggccggggtagagcaggccgttctcgtccatctcgatcggcaccgcagcgatttccagcagcgcgttgcgctggctgtcgaagccgccggtttccacatccaccaccaccggcaggaagccgcggaagcgttgtgacatcgcgcgctgcgcctggggaactgcggaatcgggaacggcggcaggtgcggggatggggtcagtcatgcgtgaattctatcagagcggccctgagcgcccggccacgcagcccatgccagccaccgtagtggcacgaacgcagaacccggtaggtgccaaccttggttggcacatgacgcgccgaccaaggtcggcatctaccgaaccgctggccgcgcaggtgtggccgagggagaccaccgcgccaaccaggcgtccacgctcagcttgccggcgccggtgaagatcagcggcagcagcatggccatgaacagcaccggcagcttgaagttgccgaagccctggtcgctgatcgcatagcccatggccaggtcggccagcgagttccactccatcggccaatgcaccgcataggtggccaccacggtcagcaccagcaggctcgcggcggcgaaacgggtgccgaaaccgaacagcaggcaggccgccccgagcagttcgaaccaggtcgccagttgccagttcagggtggccggcaactggtcgaacgggaatggaaaggcgtcctgcaggtcggcgaaccagttctggccgcgcagcttctcgcggccggattcgaagaattcccaggccagcagcaggcgcaggccgagcggggccaaccagggggcgagacggtccagctggccacgcgcggcggccagggtcggaaggttcatcaggggatctccgcaaatggggtgtcagggtggggcggtgagcggaccgatcacgccggcctgcaggaactgccgcagcagcgcggcaccggggccggccagcgcgtcttcggccagcccatgcgtggtggcgaggcgttgcaggtacgtacggccttccagcccaggctgttcaccgatgctggacagcaggtgcaccgccaaggggctgagcgcggcgaatcgcacttcaccgtcggcttcgcggcggaccagcaggccggtgggttctgggaggggctgggtcggcgcatcctctgcaccgagacggtgcaccggccactggtacagcagcggccacgccagcggcgaacgctgcagcggcacccgcagcggatcgacatcgccaggcgcaggaagtggctcggcctgcaactggtacagcgcggtttccacccactcgtagtgggccagttcggccagcgccgggtgcggcagctgcggctgtgcctgcagccactgcacgaactcggcggccagctcggtgaacaggggggtctggcagcgatgggtggcgaagtagtggcgcaccagcgcgctccatgccggttcgccgagcaggcggacgcagaccgggaaaccgttgctcaggagcccgagcaggttgttgaacagcaggtgctggtacaccgccaaccggcgtgcatccaggccggccggtgccggcaccgcctgtggatcgcgcaggtgcgcggtgaacgcgtgctgctgcgcgcgcagggtgtcgatagcgtcagccatgtgcagccccggcgtgtgcggcctgcaggcggcggatggtctgcagttcgccctgcagttccgcatagggcgggaaattgaaatcgcgttcgagcagggtggggcgtgggccgatgcgagcataggtacgcgccagcaactcccagaccggatcaatcaccgcgctgccatgggtatcgatcttcaggtcgggtgcctcgtccaggtgcccggccacgtgcaggcagacgatgcgctgcgcgggcaggccggcgatgaaggcatcggcatcgtagccgtggttgcaggcgttgacgtagacgttgttgacgtccagcagcaggtcgcagtcggcttcggcgagcaccgcattggtgaacgccagctcgtccatcgccggttccggcgccaggtagtaggacacgttctccaccgcgatgcgccggccgagcaggtcctgcacgcggcggatgcgctgcgcggtatggcgcacggcttcgtcggtgaaggggatcggcagcaggtcgtacaggtggccgtcgtcgctgcagtagctcaggtgctcgctgtacagcggcacgcggtgcttttcgaggaaccggccgacctgctccagcagctgggtgtccagggcggcactgccgcccagcgacagcgacaggccgtggcagctcagcggatggcggtgtgccagttcggccagggcatcaccggccgggccgccgacatggatccagttctccggcgcgcattccaggaagtcgaagtcgcctgccggagcgtcacgcagatcctgcagcagcgcccggcgcaggcccaaccctgcagccgccgcgcgaagcggcgactgcgggtggacgaggctggcgcggacgtcagtgcttgccaccgcacttgccttcgccgcacttgccttcagccgacttcgtgtcgccggtcttggccttggcgcccgctgcgccggcagccttgcccttgtcggcaccgcacttgccttcgccggtcttgccgtcggcaccacacttgccttcggcgtgcttggtcgcgtcggctgccatcttggtatcggcggccttggcatcggtgctggccttggctgcctggccggccaccaggtagccctgggcgaggtcgctcatgctcagcgccgaggcgctggcggtcatgcccaggccggcggccagggcggtagcggtcagcagggacagggtcttgttggaactgctcatcggtcttactcctgggtggtgggcaggtgcccggggtgaatcgatggtgcagcgatcctactcaacgaatcctcgccaagaactcaaattttcgtgagatctgttacagaagcatccggcaggtccgcaccgggcaagcccggcgggcccaatgcgggggaactccccaaaaaagaaggccgctgtcaccaggacagcggccaccttggagtcgactccggtgttgcagtgcagcgtcagggctggccggtgctggaggtctcgtcgcgcttttcacgcggtggcagcggctgctcgccatgcaccaggaaccatacgttctcggcgatgttggtggcgtggtcgcccacgcgctccaggttcttggccatgaacagcaggtgcgtgcacggggtgatgttgcgcgggtcttccatcatgtaggtcagcagctcgcggaacagcgcggtgtactgcgcgtccaggcgggcgtcgtcctcacgcagttccagcgcggcatcagcatcgttgtcgcggtaggcggcaatggcacgccggacctgctgcgcggccaggcggcccagtgcacgcaggccctggatctgcggcagcggcggcaccttgcccagcgcgatcgagcgcttggcgacgttggcagcgtagtcaccgatgcgctcgatgtcggccggaatgcgcaggccggcaaggatctcgcgcaggtcgcgcgccatcgggccacgcagcgccaggcgcatcacgtcgtggctgatctgctgttccagcgcatcgatcgcctcgtcgttggcgatgatgcgatgggcagcgttttcgtcgcgcttctcgatcacgtccatcgacgcttcgagctgggcgacggccatctcgcccatgcgcacgatctcggccaccaggcgctgctgctcttcgtcgtagctcttgacgatgtggtcgttgggaaggttcatggttgttccactctgtagagtcgagccacgctcgactgatggtgtctgcagggtcgagccgtgctcgactgacgtttcagccgaagcggccggtgatgtagtcctcggtctgccgctgcgacggctgcgagaagatcacttcggtgcggtcgtgctcgatcaggtcgcccaggtacatgaaggcggtgtagtcggacacgcgtgcggcctgctgcatgttgtgggtgacgatcacgatggtgtactcgtgcttgagttcttccaccagctgctcgatgcggctggtcgagatcggatccagcgccgaggtcggctcgtccagcagcagcaccgacgggcgcagggccacggcacgggcgatgcacaggcgctgctgctggccgccggacaggcccagtgcgctctgccccagcttgtccttcacttcgtcccacagcgcgccctggcgcagcgcctgctcgacgcggtcggccatgtcggccttgctcagcttctcgtggtggcggatgccgtaggccacgttctcgaagatggtcatcgggaacggcaccggcttctggaacaccatgccgaccttgctgcgcaggcggttcatcgggtacttcggcgacaggatgttctcgccgtccagcagcacttcaccgcgcgcttccagcttcgggtacagcgcgtagatgcggttgaagatgcgcagcagggtcgacttgccgcaaccggaaggaccgatcagcgcggtcacgcgcttttccgggatttccaggttgatgcccttcagggcgtggaacttgtcgtagtagaagtccagtccacgcgcagccagcttcaccggcgacggcgtgtgcaggctctcgtgcgaggacggcacggcgatgcgctgcatcggcacggcgttggaaaggtcgttcatggcgttatccacggaaaggtcagtcatgggagatacggttgcgcagcaggatgccgcgggcggcaaggctgaccagcaacacgaagacagtcagcaccagggcaccggcccaggccagcacctgccaggattcatacgggctgccggcgaactggttcatcaccaccggcaccgaggccatcggctggaagatgttgttgttccagtactggttgccgaaggcggtgaacagcagcggtgcggtctcgccggagatgcgggccagtgccagcaggatgccggtgatgatgccggccgaggcactgcggtacagcacctgcacgatcaccttccactgcgggatgcccagcgacagggccgcttcgcgcatctgcgagggcaccaggcgcagcatctcgtcggtggtgcgtaccaccaccggcagcacgatgaaggccagcgacagcgcaccggcgaacgccgagaagttgccgccggtctgcatcacgtacagggtgtagacgaacaggccgagcacgatggacggggccgacagcaggatgtcgttgacgaagcggaccacggtgccggccttgcgggcgttgccgtactcggccagccaggtgcccgccaatacgcccagcggggtgccgatgccgatggccagcgcacacatcacggcgctgccgaagaacgcgttggcgaggccgccttcctgcatcggcggcggcgtcatcttggtgaacagatccaggttgatgccggccaggcccttggaggccagggtgaacaggatccagcccaggaagaacaaaccgaacagcgcggtggcgcaggaggcggtgatcgcaacgacattgccgatgcggcggcgcaggtacagggagtcagcggtgctggacatcagttgccctccttgcgggacaggcgcatcagcatcaggcgggcgatggcgagcaccacgaaggtgacgatgaagaggacgaagccgagcagcagcagggccgaacggtaggtttcagtggcttcaccgaaatcgttggcgatcagcgcagcaatggtggtgcccggttccagcagcgacggcgacaggcgcacgctgttgccgatcacgaaggccaccgccatcgtctcgccgagggcgcggccgaggccgaggaagatgccgccgatcaccgccgagcgggtgtagggcagcacgatgtcccagctcacttcccacttggtggagcccagcgcataggccgattccttcaggcgggtcggcacggtcaggaacacttcgcgcatcaccgaggagatgaacggaatgaccatgatcgccagcacgaaaccggcggtgagcatgccgatgcccagcggcgggccctggaacatcgggccgatgatcggccattcgcccagggtctcgttgaggaacggcgtgacgtactcggtcatcaccggcaccagcacgaacaggccccacatgccgtagatgatcgagggaatgccggccagcagttcgatggctgtgccgaccgggccacgcagccagcgtggtgcgacttcggtgaggaagaaggcgatgccgaagctgaccggcacggcgatgaccatcgcaatgacggcggtgaccagggtgccgtagatcggggcgagcgcgccgaacttgttttcgaccggattccagtcggcggagaagaagaagctcaggccctgcatctgcagggcatggcggccgccccacagcatcgacagcgcggcgcaggccagggcgatcaggacgaagatgacggtgccgaccagcacccatcggaacagtttgtcgttgcgggcatcacgcgcatcacgcgtggacggggcggctacaggctgggcgatggcattcatggggacggcagggccaggaaggggcggggcggcacggcgtggaagcggtgcccgcgcggggcgggcaccgtcgagtccgtcacttcaggtcggtcgcccagtaggcctcgatctgcttgaccagttcggccggcagcggcacgtagtgcagctcgttggcctgggcctggccgttctcgaaggcccacttgaagaaggccagggtgtcctggttgcgcttggcgtccttcggctgcttctgcatcagcatgaagttggtggcggtgatcggccacgcctgctcgcccggggcgttggtgatgaccaggttgaagtccttggcgctggcccagtcggcgctggcggccgccgcggcgaaggtttccgcgctgggctcgacccagttgccggcggcgttctgcatggcggtgtacggcatgccgttctgcagcgcgtaggccagctcgacgtagccgatggagcccttgatctgcttcacgtacgaagcgacgccttcattgcccttgccaccgacgccgtccggccactgcaccgaggtgccttcgccgaccttgctcttccactccgggctgaccttggacaggtagttggagaagttgaaggtggtgcccgaaccgtccgaacggtggaccagggtgatcttgccgtccggcagcttcacgcccgggttggcggcgacgatggccggatcgttccaggtcttgaccttgcccaggaagatgtcggccagcagggcgccgctcaggcgcagcttgccggcttccaggccttcgatgttgaccaccggcaccacgccgccgatggccgacgggaactgggccaggccggcctgtgccagctcttcgctgctcagcggcttgtcggaggagccgaagtcgacggtgccggccttgatctgggcgatgccgccgccggagccgatcgactggtagttgatcttggccccggtggtggcgttgtagtcggccgaccacttggagaccagcgggaagatgaaggacgcgcccgcgccggacacttcggcggtcaccttggcaccggcagcggccggggcagcggcaccgtcggccgccggctgctgcgcggcctgcttgtcgccaccgcaggccgacaggcccagggcgatggccagggaaagggcggcaaggccggccgagtgcagtttcatggtcactccatagcggggaagagccgacgtggtcggcggatgcggctatgaaatgatgtttttgttacagccgtattacgaccatgacagaggtgtcctggatcacgttctgacaagggtttcaccgggttggcccccatccggcagagccccggagaccccggatctgcgcaccggtatggcggccggttggcccttgtggagtcaagccatgttcgacggctccctgccctcggtaggtgcggaccgtcggtccgcacgctccagcacccagccgagcgtgggctcggcgctgcagaggcagatgcatgcatccccgaaaacaagaagagcgcgagatctcgaggatctcgcgcccggttggggccggcgggggagagaggacccgccggccccgttcctgcgggggaacgtgcttacttcaggttctgcgaccagtaggtctcgatctggcggaccaggctgtccggcagcggcacgtagtccagctggcgggcctgggcgtcgccgctcttgtagacccagcggaagaactcctgggtggccttgccgttggcagcgttcttcggcttcttgtgcaccaggatgaagttggtggcggtgatcggccaggactcggcgcccggggcgttggtcatcaccaggtagaagtccttggcgctggcccagtcggcgctggcggcagcggcggcgaacgatgcatcgctcggctgcacgaacctgccggcagcgttcttcatcgccgtgtacgacagcttgttctgcagtgcgtaggacagttcgacgtagccgatgccgcccttgatctgcttcacgtaggcagcaacgccttcgttgcccttgccgccgatgccggccggccactggaccgaggtgccttcaccgaccgagctcttccactccgggctgaccttggacaggtagttgacaaagttgaaggtggtgcccgaaccatccgagcggtgcacgacggtgatcttggcgctcggcagggtcacgcccgggttcagcgcggcgatggccgggtcgttccaggtcttgatcttgcccaggaagatgttggccagcacggtgccgtccagcttgagtgcgcccggggcgatgccggccacgttgaccaccggcaccacgccgccgatcaccgacgggaactgggccaggcccgaggcggccagttcttccggcttcagcggtgcatcggaagagccgaaatcaacggtcttggccttgatctgcgcaatgccgccgccggaaccgatcgactggtagttgaccttgttgctggtggcagcgttgtagtcggccgaccacttcgacatcaccgggtagatgaacgaggcgcccgcgccggtgatttcagcggcgttggcggcgaacacggacgacgctgcgaagacggcaacggcaacgcgcgacttgaaggcgtggatcacggggtggctcctgggttgattggaatgcggggttacccgcccggcgcacattccataacggttcgatgacagcgcggggaccgttgtatgacgcatccgttacagcgctggctggcgcttgcgcagcgcgggccgtgaaggtttcgcgcagcggctgaggcggtcgtgcgggcacaagggaggtgcgccggcgccggttgcggtcaccttgcataggtggccgatgaggtgacggctgcctcccttcgcgcggtctgcgcctggcgttgcgcagggattccgcgtcatccgcgcgaagccgggcggtgcggaccagggtgacccggcggcttgcccgcgtgtcggtgccgatacaccacgccatggggcgcaacggatcgataagcatgtgcgcgcaaatgagtcgtacgcatgaccgcacgaagaaatctggggttggtgctcaatctgtcattcggctgtcatggttttaacggaacgttcgcaaaacgcttgaccggcctgccggcgtggcgttctgcccaagccattccaaccctctggagaaatccaaaatgcgttcccatttgctcgccgccgcggtcgttgcaagcctcggtctggtttccgccgacgccttcgcagcccccgccagctcgggcgtgtcccaggcacagttgcagcagctgcaggcacagatcgctgcgctgcaggcccaggtccagcagttgcagaacgattcgcaggcgctgcaggcgcagtccgacgcgcagtccgaagtgaacatcacccaggcgcaggccctggaaggtgcgcagaagacccagaccagcgtcgacaagctggccaagctggtcaatgacaacaagattggcggtcgcatgttcttcgacctgaccaacatcgacaagaccagcaacggcaaggacaccgccgccagcggcaccggcctggacgtcaagcgcttctacctgaccgtcgaccacaagttcaacgacatctggtcggccaacctgaccaccgacttccagtacagctcggccatcggcaacaccgaactgttcgtcaagaaggcctacgtgcagggcagcttcgacccggccttcaacctgcgcgtcggtgccgccgacatgccgtggatcccgtacgtcgagaagttctacggcatgcgctatgtcgagaacaccctgaccgaccgcctgaagtacggcaactcgtccgactggggcctgcatggcttcggcaacctgggcaacaacttcaactacgccgtctcggtcgtgtccggcgccggctacaagaacccgacccgcagcaagggcatggacgtggaaggccgcgtggcctacaccccgaacgagaacttcgtggtcgccgtcggcggctacagcggcaagctgggcaaggaaaccgacatccagagcgccgagaacacctacacccgcgccaacgcgatggtggcctacgccgacagcaacttccgcgtcggcggcgagtacttccaggccaagaacctcaacaacgtgctgaccgttgccaccgacaagaccagtggctggtcggtgtggggcagcgtgcgcgtgaccgacggcggcatcaacgtgttcggtcgttacgatgacaccgacgtcagcaagaccctggacccgaccctgagcgacaagtactggaacgtcggcgtcgagttcccggtcatgaagaacctcaagctgtcgaccgtgtacaagtacacgcacctggccaacgccagcgacaagaagaacgacaagaccaaggaattcggcgtctggggcgacctgtcgttctgatctcctgaagcacccttgtccatacacgcggacggcgggcctggtgcccgccgtcttcgtttcgtcacaacacgatccgcgtcacgtctcggctgtggtcttttccttgaaccggcacaggtcggcgatcacgcagcccgggcaatccggcttgcgcgccttgcacacgtagcggccatgcaggatcagccaatggtgcgcgtcgagcaggaactcggccggaatcaccttcaccagcgtgtcctccacttcgcgcacgttcttgccgggggccaggccggtacggttggagacgcggaagatatgcgtatccaccgccatcaccggctcgccgaaggcggtgttgagcaccacgttggcggtcttgcggcccacgccgggcagcgcttccagcgcttcgcggtcgcgcggcacttcgccgccgtacttctgcagcaggatcgcgcaggtggcgatcacgttcttcgccttggcgttgaacagcccgatggtggcgatgtacggcttcaggccatcctcaccgagcgcgaggatcttcgccggcgtgttggcgaccgggaacaggcggcgggtggccttgttgacgccgacgtcggtggcctgggcggacagcgccacggccaccagcagttcgaacggcgagctgtactcaagctcggtcttcgggtgcggattgagctcgcgcaggcgggtgaacatttccaccacgtcggcgcgcggcatgcggccgccgcgccgcgccggtgcgcgggcagtcttcttcgcggtggccattacggctccttgccggtgacgcgggccttggcccgggcgagaatcgcggccgccgcggcgggcagggggggcttcacgtccggcgccgggggcggggtgcgacgtgcatcgcgctcggcttcgcggcgggccaggcgcaccgcgcgggcgcgatagcgttcgcgtgcggcccaggccgtacgcagttgctgctgggcctgctgcagccgctgcggaaggtccgggtggccagacagcagctgttcgtcgccggctcgggcgacgtagtccatcagccccgcctgcagggcgccatcgagatcgtctgcctggacccgggcgaacaactgcgcggggttgggtcgggatgccatggcgtcagcggctctggaaggccggcgggcggcgctgcaggaaggcactggtgccttcacgcatgtcctcggtggcgaacagcaggccgaactgcgcactttcgtattccagcccggcctccaggctgcactcgccgcccacgtgcaccgcgtcgagcaggccacgcagggccagcggtgctgagcgtgccagctggcgggcgacgtcctgcacgcggttgtccagcgcgtcagccggcacgacttcgttgacgatgcccagctccagcgcacgcgcggcgttgatcggcgcccccagcaggcacagctccagggtggcggcgcggccacacaggcgcagcaggcgctggctgccgccgaagccgggaatcaggccgagattgatttccggttggccgaccttggcggtatcggcggcgatgcgcaggtggcacgccatcgccagctcaagcccgccgcccagcgcgaaaccgttcacgcgcgcgatgaccggcttgggcatgcgttcgatctggcgcatcagggcctggcccagcagcgagaaatcacgtccctgaacggcgctgagggtgttcatttccgcgatgtcggcaccggccacgaaggccttcgggcccgccccggtcaacaccaccacgcgcacctccggatcggcagcggcgtccctgaaggcatcggccagcgcctgcagggtcgcggcgttcagggcattgagcttgtccgggcgctggacggtcacggtgcggatggcgccttcgtcggcaacagcgatcagggcatcggccacggggaaactcctggaacgttaaaaaaaagtgatattgaactctgcaaacgcagacgggtcatagcctgcatcgtgagtagcggttacacgttgcgcccgttatcctaacccgtcgcctcagggcggcgaagaacgtccctgagttaccacccctggagaactgtttgatgaagttgcgttctatcgcggtcgccgtcgcggccctggccctgacgggcaatgccttcgcccaggacatcgcgtccgagaagggcaagctgagttattacttcggttacgactacggcaacaacctggcggagctgaccggtcgcggtgagcagctggacatcaactcggtggtgaagggcctgcaggatgcctacgccaagaagcagccggcgatcaccgccgagcagctgaagccggccgttgaagcgttccagaagcgcgagcagggccgtgcccaggctgccaaggccgagtacgaaaaggcggctgccgaaaacaagaccaagagcgatcagttcatcgcggcgaacaaggccaaggccggcgtgcagtccctgccgagcggcgtccagtaccgcgtgatcgaagccggcaagggcgccaagccgacccaggccagcaccgtgcagctggaagtggccggtccgttcccgtacggccagcgcccgaccgaagcccgccctgcccagcagatcccgtcgatcaaggtcagcgaagttgaaatgaaggccatgcgcgagaccctgctgcagatgccggccggctcgaagtgggaagtcaccctgccgccggaccaggcctacggtgccgacccgcgcaccccgttcccgccgaacgtggctgtgcagttcgagatcaagctggtcagcgtcaagtaaatcgaaacagcaaacgaaacgcgccggtgatcccaccggcgcgtttctgtttgtgcagcccctggcggtgaaacgcccgcgctgcgcgcgagcgtcgactctaccgttgggccgggccacccgcgcaaattcagcccgatcgcgctactgttgccgggtgcaaacaatggaagaaacggcgcgtgttgtcgcaagtccctgcatcggagtgtgcacgctggatccgcaccggcaatgcaccggctgcgcgcggcatatcgatgagatcgcgcggtggtcgtcgatgagcaacgaggaacgcagccgcatcctgcaccgcgtgcagcccctgcgcgaacaactgcagcaatcgctgcgtggctcgctggccgaccacgagcgactgatgcgcgcgctgcaccccttggcccaaccgccggccggcgacggctggaaccgcagtgagctgatcgacctgctgccgcccgggcctccggtggaggctgcggtgctggccggcatcgtcccgcgcgccaacggcgcacaggtgatcctgacccgccgcaccgaaaccctgcgcacgcacgggggccaggtcggattccccggcggccgcaccgagcccgatgaccgtgacgcattggcggccgcgctgcgcgagagccaggaagaaatcgcattggcgcccggccaggtgcaggcgctggggtatctcgatcccttcgtcaccatcaccggctaccgggtcacgccggtggtggcggtggtggatccggatttcgtgccggtgccgcagcccagcgaagtggccgaagtgttcgaggtgccgctggattatctgatggcgcccgacagcctgcgccaggtcgaaatcactcatcgcggccgggtccgccacgtcctggagtatggctggccggggcagcgcatctggggcgcgaccgccgccattctctacaacctgcgtcgtcgcctggagcaagtgaaatgaagccgatcgatccgccgtggaccaccctggtcgatgtcaccagccttgccgctgcgctgggcgcaggcgtgcgcgtcgtcgatgcgcgtgccaccgccagcaccgccgtgcgcgtggtcgatgcgcgcgcttcgctggccgatccgcaggcggcgggcggccagtatctggcagggcacataccgactgcggtgcatgccgatctcaaccgtgatctgtcggatctgacccgaagcggccacggccggcacccgctgccggacagcgatgcgttcgccgcgaagctcggtacgtggggcatcggtcccgaaacccaggtggtggtctacgacggcagcgacggcagcatggccgcctcgcgcctgtggtggctgctgcggctgatcgggcacacccgggtggccgtgctcgacggcggtattgccgcctggcaggccgccggtcacgcgctggcgagcgggccgactgaagtgacggtgttacctgcctacccgggccgtttcgacaccacccagatcgccaacgccgatgaaatcagcgcacggctgaagcacgcgccgggctggttggtcgacgcgcgcgcgggtgagcgcttccgcggtgacgtcgagccgctggacccggtcgccggccacgtgccgggcgcggtcaaccgcccgttcgccttgaacgtactcgatggccacctgcgcgacccacatgcgctgcgcgccgaactgcagggcgtgatcggcaaccgcgatccgcagcaggtggtgctgatgtgcggctccggcgtgaccgcctgccatctgctgctggcgatggaaacggcgggcctgtccggcgcgcgcatctacgccgactcctggagcgggtgggtcagcgacagcagccgcccggtggcgaccggcgcctgagccgcgcggggtcggatccgttttccaacggagaacggttctgaccccatcaaccgaaaatcgggtcagagcccgttgcgtagcaacgggatccgaccccgtgtcgattcgaaggatcgcggagaactgttgaaggcggggtggggccggttgcgggggtgtccgcaaccggacccaccccgccatcccacggaatgccagcgtttgacgttgacgttgacgttgccgttgcctctgcgggtgcagggcgcagccctgccgcttacccaaccggctgcaacggcaccttcgccagcacccgcgcccacgggaacagcggccccggatcgcgcttgcgcgccaccgtcaacgtcgcatcgtcgctggccggcacccgttccaggtccagctggtcatgcccggcaatccgtcgcagcgacgggtagtgcgccaccagcgccagcagcagctgttccagcgcctgcagctgtgcctcggtgtaggcctcgtccatcgcctggtggcggctgtcgaaccagtccggatagcgcccggtattgaccagctcgatgcccagcgtatgcgcgttcatgccgcgcacgtgatgggccacgcgttccggtgccacgtactgcaccacgctgccatcgcggtcgatgtagaagtgcccgctgttgccggcgccgctgtcgtacagtacgcgctcgccgtactcgcgggccgtcgccagatcgggcagttcggtgcagtggatcaccaccatctccagcgtggccgggtcgcgcagcggcagacggtcttcgtagggcaggggctgcagctgcaggccgggcaggagcgggttgggcatccggcgatgctagcattgcggcatgaacctgccttctctttcctcgttggcccgctcgcacggagcacgtgcatgagccgcggccactgcatcctgtcgcatggcttcgagagcggcccggaagcgaccaaggtcaccgcgctggccgacgtggcgcagcgcctgggctggacccatgagcgcccggactacaccgacctggacgcgatgagcgaggtcagccgggtaggcgacgtgccgacccgcctgcgccgcctggtcgagcgcgccgccatcgcggcccggcaagggccggtggtgctggccggctccagcctgggcgcctacatttccgccatcgcctcgttgcaggtaccggtggccggcctgttcctgatggtgccgccgaccacgatgggcccgatgccggcgctggacgccgccgccgtgccgaccaccgtggtccaggcctggcatgacgacgtggtgccagcagcgggagtgatcgcgtgggcgcaggcgcgctcggcgcagctgatgctggtcgacgacggccaccgcctcgagcgccacgtggaggcttccgcgcaggccttcgaacgcttgctgcggcaactgtgaagcccgggcgcacggcgcgcccgcccgcattgactacaatggcagccccgccgcccccggcgcgggcctgccggccgtgcctacggccctcctttccgaccggcccggcccctgtgccgcgcccgaccacctgcgaaccgatcccgtgaaattcttcgtctcctgcgccaagggcctggaatacctgcttgccgatgaactgtcggccctgggccttggcaaggccactgccaccattgccggcgtcaacgccgagggcgaactggcgcaggcgctgcggatcgtgatgtggtcgcgcctggccagccgcgtgctgtggcccatcgacgagttcgagtgcccggatgagcaggccctgtatgacggcgtgcgtgcgctgccgtggcacgagcacatcacgccggagatgaccctggcggtggacgcgcacgtgtccggcgacaagatcacccacgcccgcttcgccgcgcagcggatcaaggacgccatcgtcgaccgcatgcgcgatgaaggcctggaacgcccctcggtcaacaccgatctgcccgacgtgcgcgtcaacctgtcgctgcgcaagggccgtgcctcgttgtcgatcgatctcggcggcggcccgctgcatcgccgtggctggcgtggtgctgcccacgaggcaccgctgaaggaaaacctggccgccgcgctgctgctgcgcgcgcaatggccgcgcctgcacgctgccggtggtggcctgctggatccgatgtgcggcagcggtaccctgctgatcgaaggtgcgctgatggccgccgacgtcgctcccggcctgatgcggcatggcagcctgccgccgagccgctggctgggcttcgacaaggccgcctggaagtccatccagagcgaagcacgtgagcgcgaagcggccggcctggccgcgctgaagccagtcatccacggcagcgacatcgatccgaccgcgatccaggcggcacgcgagaacgccgaggtcgcgggcgtcgcccacgcgatccgcttcacgcgcgccgacgtggccgacctggccgcgccggaacaggagatcggtgcggtggtctgcaatccgccgtacgacgaacgcctggccgccgatccggcgctgtaccgcgcgctgggcaacgccctgcagaaggcggtgccgcattggcgcgccagcctgctgtgcggcaacgacgaactggccttcgccaccggcctgcgcgcgggcaagaagtaccagatgttcaatggtgcgctggagtgtgcgctgatcgtctgcgacccgatcgccgtgccgggccgtgatccggcacagccgcgcgagctgagcgtaggcgcgcagatggtggccaaccgcctgcgcaagaacctgaagaagttcaagagctggcgtgcccgcgaagacatcacctgcttccgcgcctatgacgccgacctgccggagtacgcggccgccatcgacgtctacgaggaagacggcggcaagcgccgtaccttcctgcacgtgcaggaatacgccgcaccggctgccattcccgagaacgacgtgcgccgccgccgcaacgagctgctggccgctgcgcgcgaagtgttcggcgtgccgcccgagcaggtctcgatgaagtcgcgcgagcgcggcaagggcggcagcaagtacggccgcttcgagcagcgtgacgagttcatcgtggtgcgcgagaacaatgcactgctgcaggtgaatctgttcgactacctggacaccggcctgttcctcgaccaccgcccgctgcgccggatgatggccgagcaggtacgtggcaagcgcttcctcaacctgttctgctacaccggcgtggccagcgtgcaggcggcggtggccggtgccgccagcaccaccagcgtcgatctgtcggcgacctacctgcagtggtgctacgacaacctggcgttgaacgggcagggcggcaaccagcacctgctggtgcaggccgacgcgatggcgtggctggagggcgaccgtggccagtacgacgtgatcttctgtgacccgccgaccttctccaactccgcgcgcgccgatgacttcgacgtgcagcgcgagcagatcaagctgctgcgtgcagccgtggcgcggctggcgccgggcggcgtgctgtacttctccaacaatttccgccgcttcaagctggaagagaacgccatcgccgaattcgcccagtgccgcgagatcaccgcgcgcaccatcggcccggacttcgagcgcaacgcgcgcatccaccgcgcgtgggaattgaagcggttggggtaacgcgacgcccggggtcggatcccctgcgcgaagcgcaggggctctgaccccatccggatctacgcaccaggggtcagagcccttgcgcttcgcgaaagggatccgaccccggtggcccggctacagcaccgccaccaccagccccagcaccggcagcacgatcgccaacgccgcgatccacttcggccggtacgggtacagcccgaacgacagcgccagaccgcccagtgtcatcgtgcccagccacagcaccgggcccatcgcccagccgtggtcgatcacgcacagcgcgaacgccaccgtcagcagggcccagcccagcacgcgccactgggtgcgccgtgcgggcgtggctgcggcgctgccgttcaggtcgtgctggtgcttttccatcgccagcgacaacgcggtgaacgcggagaacgacagggccagtgccagcagcatcatgcgctggcctccgcttcggcggtttccgcagcgtccaccggggccctgggtgctgctgcggcggcggcgcgcttcttcttctcggccgcgctcagcggtggcgtccagcgctgcatgcgccagccgcacagcgccagcatcgcaccgaacgcgatcatcgacagatcgacgccagccagtacccagtcaccgctgcgcaatgtgacgccaagatgcgcgtgcgtggtcagcgcgttgaccaccggtaccagcgcgaacgcagccgcacccaggtacagctgccacgcccacatcatccgcttcggccagatgaaggcggccagcagcgcgccgccccaggcgtagaagaacacgttggcttccgcactcgcgcgcccggcgatgtccagcggcagcaggcggttgccccagaagtaggccgcaaaggcgatcggcaggccggccacggtgccgatgttcagcgcatcgaccaagcgcaggccgaagccggtgcggccgctcttggcatgcctgggccgttccttcaccgcccacagcaccacgccgctggccaccatcaggcagccgaccaggccggacaggaagaacagtgcacgcaggccccaatcggcgaagcgcgccaggtgcaggccgtacagcacgccacgggtggcggtggcgccaccggacggcggcgtctcttccagcagcgcgccgttgaccatgttgtagcgaacggcgggagtatcggtggacaggcgcttgccgtcgcgttggcggatgtcgatcaccgcattggccgcccccgggttggacacggtaaagccggccacttccacgccgtgccagtgcgcacgtgcgctgtccagcagctgcgcgatcggcagcggggtggcgcgtgcttcggccggcgcggtcacctccggcatgccgccgaaggcttcgctgaagaacttgtcttcgtcctgcgggtaggcgactttcaccccccacggcaggtacatgaccatcagggtgacgatgccggtgtaggtgatcatcgcgtggtagggcagggccatcaccgcactgacgttgtggaaatcgagccaggaacgcaggcccttgtccttgcggaaggtgaagaagtccttgaagattttcttgtgggtgatgacgccggtgatgatcgccaccagcatgaacatcgcgcagaagccgaccaggtagcgcgcccacagcaccgggatgtagtgcaggtcgaaatgcaggcggtagaagaaatcaccgccccgcgtttcgcgtgccttcagtgcctggccggtattcgggtccagcgtggcttcgccgaagccaccgcgacggccgcgactgggatcggccagctccggtggcaaccgccagaacatctgcatggccgggttgcgcggctgcggcagggtgacgaaccagttcccggcctgcgccgcattggcctgcaggtaatccacggcgcgctgcgcggcgacatcgatgctgacctggctggacggaagttccggtcgcatccagcggctgatttcctcgcgatagtagctggcggtgccggccatgaagatcagcagcagcaaccagccgaccagcaggccggtccaggtatgcagccaggccatcgattggcggaagccgttcttcatgcccaggcccccagcaggcgcgcaatggccaccatcagcagggtgggagcgagaatgccgacccaggcgcgcagcgcgctgcgggtcgcgaacgcccacagcgctgcgcaggcggccaccaggatggccagcagcatgccggtcagcacggcctggccgcgcgcaccgggcagcgccaccgcgcagaacacgctggtggccgaagccagcgcgtagccgccgaagatcgcggccagcgagcgtgacagcacgccccagcatggattggagaagaaggtgcgggggctggcggttgcgggcgagcggtccacggcgttcctgcaggtaggggaggggatggaacgcgtccgcggcccccttgcgccctgcgcatgtcgcccagcgtgtcccatcgacgaagcactgcccgcgcaggcgggcaatccagaggtcggggatgtacacgggcgatgggcgcgtcttccgcgcccgcttggctaagcgtacaaccgatcagtaaatgataggcattcgcattttatgaatcaagcatgatgatccgggggcgcaccgaggcctagaacctgaacaccactgtcgccgcatgcagcaacaggccgatcagcccacccaccagcgtgccgttgaagcggatgaactgcaggtcgcggcccacgctcagttccagctgttcgaccagatggcgctcgtcccagcccttcacggtctgcgcgatatgcgtggtcacaccctcgcgcaggcggccggtcaggcgttgcgcaccttccagcaggtgctggttgagggcctcgcgcagggccgggtccgcctgcaggctggcgcccagcgaggcgaggctgcgctgcaggtgcccgaccagcgccgagtcctcgcgctgcaggtcgtcgcgcaggctggcgtggatgcgcgcccacagcccctgcacgtagtcctgcagggcggggtggtcgatcatttcccgcttgagctgttcgatgcgctcgtccagggccgggtcctcgcgcaggcgctgcacgtagttctgcagccaggtctcgtagtcctggcgcagcggatgctgcggctcggccaatacctgctgcagttcttccagcaccgcccgcgccaggcgctcggccaggctgtcgccgatctcatcgatcggcttcacccagttcaccgtgctcgacagcgtcggccattcgcgctggatgtagcgcacgatcagctgcgaggcgcgttccttcacttctggctgttccagccagcggccgagccgctgcaggccctcgtccagcacgcgctggtggcgcccgtcggcggtcagcagggccagcagctcaccggcggtggcggcggcattccactgccgcagctgctgcaccacgaacgcatgcagctgccggcgcaccgctgtctcgtcgaagaagtccagtgcctgcagggcccagccgcgtgccatgtccgccagcatccgcgagcgcgccgggtcggccagccaactgccgaggcggctggccggatcgaacacctgcagcttggccagcagcacctgcggttccaggaactggtcacgcacgaacagggcgaggctgtcgccgatgcgttccttgctgcgcgggatgatcgcagtgtgcggaatcggcaggcccatcgggcgccggaacagcgcgacgacggcgaaccagtcggccagtgcgcccacggctgcggcctcgcagaacgccgagacccaggcccagatgccgcgttcgccctgccagtggctgaccgcgaatccggccagcatcaacagcagcaggcccagtgcgagggctttcaggcgtcgcagctgagcgcggcgcggatcgtgggcaggcgtcatgccggaagtctaaccgcagcccggtgacgcctgtctgtagagccgagcccatgctcggctgccttgcgcgtggcaaagagcagccgagcatgggctcggctccacagaagcgcgtcgagagcgcttacagcgcttccagttgcttgcgcaacgcagccagctgcgcgcgcagggtgtcgttctcgcgggtcagcgcgacgacgcggcggcgcagtgccggggcatcctcgcccagttgttccagcgccgacagcacttcggcgtcgcggctggcgatctgctcctcgtccggttcctcgaagtccatctcggccgcttccggcttcggtgcgcgcggcttgcgcttggactcgcgcacgcgcttggcggcctgcttcagctcgtccttgccaccggcggcggcggcgcgctgctcttcttccggcaggtcggccacggcggcggcggcgctgatcgagatcacgccggccttgaccgcttccaccacctcggcggcggcctgggcgtggatgcgctcgatcatgccgacctggctggtgctcagcttggcttcgcgcgccagctcggcgcggctgatcttcggtgccggttcccacggcggactgtcttcaccggtctcatcggcgacgtcggcggtgccatcgctctcgcgctgcagctgcgcctgctcgacctgcttgcgggcggccaggatgtcgcgcttgcgcagcgccagcacgccgcgctggaagtcggacacgctgcggcggcccagatgctgttcgatcatccacaggtgcacgtcttccatgctctggaagcgggtgttctgcacggtattgaagggcaggccatgcttctggcagatgccgaaacggttatggccatcgaccagtacattcccccacaacaccagcgcatcgcggcagccttcggccaggatgctgcgctccagcgcgtcatgttcgtccgcggtcagcgggtcgatgtaggccttgagttcttctttgacgacgatatccatgggcacggcagcgagcaggagcggaaccgcccattgtacccgctcgccaccaccggcccgggctcaggcggtggcccggatcatctcgcccagggtgccggtgatctggtcgatctgcgccttgtccacgatcagcggcggcgacagcgcgatgatgtcgccggtgcagcgcaccagcagtcggccgtcgtggaagcagcgccggtagacctcgtagccccggctgcccggcgcatcgcggcgaggcgccagctcaaccgcgccgaccaggccgaagttgcggatgtcgatcacgttgggcaggccctgcagcgcatgcagtcgttcctgccagtactcgcccagctcgatggcgcgctcgaacagacgctcctcggcatagacctccagcgtcgccagcgccgcggcgcaggccagcgggtgccccgaacaggtatagccatggaaaagctcgatggcctgtggcggtgcctgcatcagggttgcatgcacggcgtcgctggccagcacgccacccagcggtaccgcgccgttgctgaccgccttggcgaaggtcagcaggtccggggtgaccccgaagcgctgcgcggcgaagggcatcccaacccggccgaaaccggtgatgacctcgtcgaacaccagcaggatgccgtgctggtcgcacagttcgcgcaggcgctgcaggtaacccggtgcgggcaggatcaccccggctgagccggcaatgggttcaacgaatacggcggcaatcgtcgaggcatcatgcagcgcgatcagccgttccaggtcatcggccagctccgcgccctggcgcggcaggcccctgctgaacgcattgcgcggcaggtccagggtgtggcgcaggtagtcgacaccgcccagctgcaggccgaacggcttgcggttgttgggcagcccgcccagcgccatgccgccgaaacccaccccgtggtaggccttctcgcggctgatgaagcgggtgcgctggccctcgccgcgctggcggtggtaggccagcacgatcttcatcgcggtatccaccgcctcggaaccggagctggtgaagaacacatggttgagcgggcccggcgccaaggcggccagccgctgcgccagcgcgaaggccggcggcgagcccatctggaaggccggcgaatagtcgagcgtgcgcgcctgctcgacgatggcctcgacgatgcgcggccgtgcatggcccgcgttgcagcaccagaggccggcggtgccatcgaggatctggcggccgtcgacatcctcgtagtgcatgccctcggcacgcaccagcacacgcggcgcggccttgaactggcggttggcggtgaacggcatccagtacgcctccaatgactccgggcgtcgggtggccagatcgtgcaggtcgctcgcggaacgcttcatgccagctccatcgggtccgatgggggaaatgtagcgcagccacgtcacggtggagtcgcggccgcgccggtataaccggggaaactgttccgaggagcccgacatggccgactttcccgaccacagccactggcaggcgctggcccagcagctttcgatacccggacaggcctttatcgagggtcgttacaccgacgctgccagcggcgcgcgcttcgactgcatcagcccgattgatggtcgcgtgctgggggtggtcgccgactgcgatgcacaggacgtggagcgcgcagtgggcgcggcgcggcgtgccttcgatgcgggccactggtcacaggccagcccggcccatcgcaagcgcgtgctgctggcgttggcggcgttggtggaaaaacacgcggacgagctggccctgctggaaaccctggacatgggcaagccggtgcgtgatgcgcgtcgtatcgacctgcccggcgcggtgcgctgcctgcgctggacggccgaagcggtggacaagctgtacggtgaggtcgcgcccaccggcccgcatgagctgggcctggtcacgcgcgagcccgccggcgtggtggcggcgatcgtgccgtggaatttcccgttgctgatggcgtgctggaagatcgcgcctgcattggccatgggcaactcggtggtgctcaagccttccgagcgctcgcccctgagtgcgttgcggctggcggcgctggccgccgaagcgggcctgccggagggcgtgctgaacgtgctgccgggccacggtgcgcgcgtcggtgagccgttggccctgcacatggatgtggacgtgctggcgttcaccggctccacggccaccggcgcgcggctgctgcagtattcagggcggtccaacctcaagcgggtctggctggagtgtggtggcaagagcccgcacgtggtgtttgccgatgcccccgatctggatgccgctgcgaaggcggtggcacggggcatcttcttcaaccagggcgaggtctgtactgccgggtcacggctgctggtgcagcgctcgatccgcgaggatttcgtgcaccaggtggttgcctacggccagcacatgcagccgcgccacccgcttgacgccgacgcaccgatgggcgcgctggtggatgccgcgcatctggacaaggtgatgggggatatcgtgcgtgccgaaagcgagggcgcccgcctgctgctgggcggtcatcgcgccgatgtcgaggcgggcggttgttatgtgcagcccacggtgttcgatcaggtgagccccgaccaggcattggcgcgcgaggaagtattcgggccggtgctggcggtgctcggctttgacgacgaagccgaagcggtgcgcctggccaatgacagccgctacggcctcgccgccggcctgtggacgcgcgatcttgcccgcgcccatcgcgtcgcacgccagctgcgcgccggcagcgtctgggtgaacggctgggatggcggtgacatgaccgccccgttcggtggctacaagcagtccggcaatgggcgcgacaaatcgctgcatgcgttcgacaagtacagcgagatcaaggccacctggatccagctgtaacggcgtcgggacttgcgcccacctgtggagccgagccgatgctcggctgcatttcgtggaatgtggtcgagcaggggcgagaacttgcagaacaatggcgcctgccaccctcgttggcatcggtgtcggctgaaaccatcgtcccgtgcggccaccggcccgtggcagaatcgggcgatccgccgttacccgtgttgccgatgtcgacgatcaccgctgccgcaccgcccgtgaactctccccgccgcgtcctgttggccagcctgatcggcaccaccatcgaattcttcgatttctacatctacgccacggccgcggtgctggtgttcccgcacctgttcttcccggacagcagcgaacaggcggcgctgttgcagtcactggcgaccttcgcggtggcgttcatcgcacggccggtcggctcggcggtgttcggccatttcggcgaccgcatcggccgcaaggccaccctggtcgccgcgttgctgaccatgggcctgtccacggtgctgatcggtctgctgccgacccacgcgcagattggcctgtgggcgcccgcgctgctggcgctgtgccgcttcggccagggcctggggctgggcggcgagtggggtggggcggtgctgctggccaccgagaacgcgccgccgggcaagcgcgcctggtacggcatgttcccgcagctgggcgcgccgatcggtttcctgttgtcggcgggcattttcctggcgctcggccgctgcctgagccaggacgacttcctgcagtggggctggcgtattccgttcgtggccagcgcgctgctggtcggcctgggcctgtgggtgcgcctgaacatccatgagacgcccgacttcaagcaggcactggagcgcaaggcgccggtgcggctgccgatgtggacggtgctgcgtgaccatccggtggcgatgctgctgggcacgctgggggcgttcgccaccttcgtgctgttctacctgatgaccgtgttcagcctcggccatggcaccgccgtgctgggctacagccgcgagcagttcctgctgatgcagatggccggcatgctgttcttcgcgctgggcatcccgttgtcggcgcgctatggcgaccgctggggcacgcgtcgcacgatgatcgtggccagcgtgctgatcatcggcttcggcgtgctgttcgctccgctgttccagccgcacagtccctggctggtcacggcgttcctgtgcctgggcctgttcctgatggggctgacctacggcccctgcggcaccttcctggccgagatctacccggtggaagtgcgctacaccggcgcctcgctgtcattcaacctggccggcattctgggtgcggcgccggcgccgtacctggccacctggctggccgaacgcttcggcctggtcgcggtcggctactacctttgcctgactgcggcagcgaccctgtgcgcgctggtggccctgcaccggcgcgcgctgcggctcagccaaagaagcgcttgagcgtgcgccccagccaaccgccgccctggtgttcgcgggcgaactggttcaagtgcgccttgacctgttcggcgtaggcctggtcatcgccgcggatgtggttgaacaaccagcgcgagagcatggtgcgcagttcatcgctgatgtcctcgccggcctggaagcgcatgcggtactccgatacccgcttgatgaagacttcatgcacgcgcttgtgcgcggcacagaacggatagcccgcttcctccatcagttcttcctcgaacgcgaagtgcgacatggtgtagtcgaccacttcgtcgatcacctcgcccactgccgcacgctgcatgctggcctgggccacgtgcaaatggttgagcatctcgatgatgcggcggtgttgttggtcgatcacatcgatgccgatgttcagatcgtcctgccagaccagtagtgccatccccggctccccttcatgcgtatgtcggggctgactgtagagctgccgcgctggcgcggcgttgatctggatcaaggctgcccggtcaggtcagcgcgggctcgcgcgggcgcagcgggctggccaccgtggtgcagctgacccggttgcggccgccggccttggccaggtacagctggcggtcggcttcggagatcagccgatgcagtgcatcgcgctgcgggcgcaggcagcacaggccgatgctcaccgtcatgcgcaggctggcggtgccgatgtccacttccagcgcggcgatgcgctggcgcagttcctcgaagtacagcagggcctcgtcctgctccatgtccggcaccagcaggcagaactcctcgccgccgaagcgggcggtcaggtcgtggctgcgggcatgcgcggccaccgcaccggccaccgcgcgcagcgcgtcatcgccggcttcgtgaccgtaggtgtcgttgatgtgcttgaagtggtcgatgtcgatcattgccaccgccacgcactggccatgcagctgcagttgcggcagctggcgctggctctgttccaggaagcagcgacggttgggcaggccggtgaggaagtcgcgggtggccaggtcctgcagcgtgccgatcagctccagctgatccacgttctgcgagacccggcagaagaactcctcgcgcgagaacggcttgcgcaggaagtcgttggcgccgttcttcaggaagcgcgggatcagcgaggcatcggtattgccggaaatgccgatcaccgccaccttgtcgcgcgagcgcagggtgcgcaggcggcgggtgaactccacgccctgcatgcccggcatttcctggtcgaccacggccaggcggatcgcaggatgcgcgtcgatcgcggccaggccctcgttgccgtcagcggcctcgtgcacctcgtggccatacatgcgcagcagggcggcggcatagccgcgcgcggacggcgagtcgtccaccaccagtgccgcaatgcgccggttgcgctccaggcgctgcaccagccacaccaggtagtcgatgctgcccggcgtgttcttcagcacgtagtcgatgatctgctgctgcagtacgcgcttgcgcagatcctcgtcgtagacgctgctgaccaccacggtgggcaggccgcgcctgaggaagaactcgaccaccgcgtcgcggtcgccgtcggccagcaccagcccggtcagtaccaggaaccagcccccatcctcgctcagcaggcgatcggcctcggccagggtggaagcgatcaccaccggcagttccaggcgctgctcgatggcctcgcgcagcatgccggtgaacgcacgggagttttcgaccagcaggatccgctgcggcagcggatcggccaggtcgccatcgacggcggcctgcggcaggacgggcatgatgcggtggctcacgagggagggactcggcacggatagcggcggtttcgggtgcaactttagccggagcagcgtgccctgcgcgtcgttcaccgatcaggcaggcgatgcgaatgccgccgctgtacccgcaagcgattcgtgcaggacgagccggagccggttgccacggcaatgcaccgtgccgccgtaggccattatccggccggccagacgctcgatggcctgctgaacggtccggttcgacagcgtgcgaccgcggtcaagcaggccaacgaccaccacgatgccgcgccggtcgcccgcctggccgctccgggcgcgcacgctgacctgtcccgactccagttccagcagcagcgacaccgcctcgatcagcgagcgatagatggcgagctgcaggtcgacagtcagcaggcaggggttgccctccagccggggcggaatcacgcgatgggagttgtcccagctttcgcatgcgccgctaacccgcagcgcgatatacagcccaacctgctccagccccgtggggtagaccagactggcctgttcacggaacagccgcgagtgcacggatgaggcgtgctgcaggctgttggccaccgcatgatgcccctgcgccttgagccagctgaccatctcgccgagcgagctgtccatgccttcgccgagttgcttgagatgggaggcgcgctcgcgaagctcacgctcacgggtctggtgcgaactacgtgccaggcgcaacgtggtttcctctgccagtccacggcaccgtgcacgctcatggtgatagctgatgctggaccccagggcgagcagtgcgacactcatcacggccatgttctgctgggtggcgaaggtgcccaggtcgaacgaggacggtaggccggtgctgggtgtggcgaaatggagtggaaggttcaacagcggaatcgcgatggcagcgccacgccacccatgcatgaaggtcagggcgatcgctgggagggaggacagcagtaccagatgggtgcgtgtggtgtgggcgctgatggccgtaagctgcatgcacaggcccaggaccagcatcaccaggatggccgtgaccgtaggcgcagcaaagcggcgcgtccaattgggggccgcgtgtcgtcgcgaccagaggaatgccaacggcacgagggtgatgatggcggcgaagtggccaaagatcgtgcgatcaactgcgctaagcaggttgctcggcggtgggttcgaccacagagcaaatgaaatgcccatattgagagccgggacgaacaacgccatgcagaaggtcaacgacagcaaccagaggccggtggcggactccgatggcattctaatgcgatgcaggtagaccaccagcatcgccaccggcatcagcagcgtcgaggccaggatgacccaggccaggccgtagctgtcgatcatgggaatgcgcaaggttgcgaagtacgcgtactcgccaagcagcaggtagggccacaggcgggtcgggacgatcagtagtgccgctgcccggatgcccgcgggcaggaagaactgatccagcgagaactgacgcgaggcaaggcagcccagggcgtagacggccgcgagtgcgattccgacgggtcggatccggaagctcagttcaattgcttctttgaatcggtccaagcccgcgcctctcatctcccggccaatgatgactgaccacttccgcagacactatcgacagttggagatgggtgcaatcgaggtgtctggcctccctttgcgctgcaatcggcggcttcccatgcttcgaggccctacatgcccggcagtgcggcggcatagccaccagaggacggtgaatcatccacaatcagtgcgcccatgtgtcgatcgcgtttcagccgttgcacccgccacgttcggcggttgatgctgtccgctgtgttcgccgtcacacaatcgacgacatcctgctgttgcacgcgcctgtccaggtccttgtcgcagatgccgctgacccgcaccgtgcgcgggtttcgccgcgggtattggcgatttcggaggcagcttcggcgtggcatgggtttgcatcgatccagtggattatctccgacaggcactgcggagtccgcccggtatatgctgatgcgattggcggtagcatccttcttgatccgtatcgcatccaacctggaggtcagtgtgagaagtttccgaattcatgcatttgctggtgcattgatgttggtgccggtatccgtttttgcttttgccccgagtgacgaccatggaatcaagttggccggccaaggactcggccagtcgattccgcaggcacaagacctcagcgtggatcccggctggttggtctatgggttcgagcgcgatggcatggattatttccaggtaaacgatctcgcagggcacgtgcacatcgtgatcggcaatgctgccggcacgttctgggtgctgccggcaggtgacccgtctgcgaaggtgtcgttgccggagcagcgcctgcctgttcccgccaaggccaccagaacggttgtctatcgggcccccgcattcacgctggtcagatatgcaagcggagctgatgtgttgtgggcagtagaggcaccctgatactgacagttgccgggatatcggccagcttcagtatcagactgcatgggcacccggtgttcgccgggtgcccatgacgccctgggccagggggacgagcgggacgttatgcgattctgctgtgttggttcgatccggtcgcttgactgtgaaatgcactactgcagcgcagagggtgcggggcagccgtaccgcgatggagtactggctactgcctccagtctggtttcgcggtcgaggaacagaatcctgacccggttgcgatagcagtcaacggtcccgtcataggggagggttcgcccggtcagtcgctcgaacgctgccatcgttgtctgcttggaaaggcgtctgcgctgttccagcagtgacacgaccatgaggattccgcgcctggagcccattccgccgcaccttgcacgaatgcgaatctgaccaccttcatgcttgagaagaatggagaccgcatcaatcagtgtccggtaagcggccaactgcagttccacgctcaggttgcaggggtcgcctttcagatccgggcggagaacgcgctccgtcagcttccacgactcacggatgccacccgcctgcagggccacgtaaagcccaagatgctccaggcccgagggatagaccatgcttgtctgttcgcgaaagagccgcgaatgtacattcgaggtatgcagaaggctgttggccactgcgtgatgtccctgggccttgagccattcggccagctcaaccagcgacgtatcaatgccgtcgccgagcttgcgaaggtgcagggcacgttcacgcagctccatctcgctggccaattgcgagctcctcgccagatggatggcgtccctttcccccctctcgcgcagcctgtaacggtggtagaagtgggtgatgcgtgatccgagcagcagcaatacgatgccgctgatcgccatgatctgctgggtgatgaaggccgctggatcgaatgcggtgggatgggtgttgggcgtggtcaggccgatgaccatgttgagcaccggcactgcaagggcagcccccttccagccatacaggcaggtaagcgcggccgcggggagtgccaacagcagcaggaacgttgccttcaatgcaatccagtctgcgggcagttgagtcgctgctatcccgatcagcagcatcgatgaaagtgctgccagcatcggggtctttcgtcgagcgttccactcctgccccacgtcctgtcgcgcccacagcatggcgatgggggccaccgtcagaatgccgatgaaatcacccacgctgaagcgcgcggcattggtcaggaagggtgtggaaggaggtgttggccagagcagatgggaaaagctgaggttgagcagagtaataacgacgctggaagcggcggcaatcaacaagaggccgatcgtctgcgactccgccatcagtcgccgttgcagcttcacaatcagcatcaccgctggcatgaggaatgcggaggcaacaatgacccatgtcaggccgtacttctcgatcatcggcacgcgggactgtgcaaagtacgcatattcgcccagcagcaggtagggccacaggcgcggcgggcacaacagcacggctgccacccggatgccggctggcaaatagaactgatccagcgacagctgtcgggttgcccaataggcaactgcataaagcaaggcaatcatcaggccagccggacgaatgcgcaccttcagcaacaatccttctttccaccagtccaatcgcacgtccccctctcctacgtgtcccctgtcagcatccattcgccgcggggcccggtttctcaggacggtatcggtctgcgaacgattatgcaattgcatagctgcgcatttaggaaattgtccagccatccatcacagatgtcgcgtgaaaatctgtgacgtgtgcagcacgatcagcgctgcggtacgtttgtcagaacgttcaatacaggtggagatgcagaatcttcaccacaacgcatcccgcagcttgtaccaggacatcgccgccaccagcagcggcgtgcgcagcagccggccgccggggaagggcgcatgccgaaggcgctggaacacgtccaggcgctcgctctggccggcaatggcggcggcgatcacctcgccggccagcccggcggcggccaccccatggccggagaagccctgcgcgaagtacaggtcgccgtccagccggccccaatgcggggcgcggttgcgggtgatgtccacatagccgccccagacctggtccagcgccacgtcggccagctgtgggaacacctggtgcatgcgccgctgcatcaccccgcgcaggccgggtgggggcagcgccgagtagctggcgcgcccgccaaacagcagccgatggtcatggctgaggcggaaatagtccaatgcccaggcggtgtcggccacggccatgtcgttgccgatcagggcgcgggcgcgctcggcccccagcggcgcgctggcgccgatataggtgccgaccggcatgatccgccgttccagctcgggcaacaggccctgcagccaggcatttccggccaccaccagatgcgcggcgcgtacgctgccctgcgcggtgtgcagggtgggctgcggtccgcgctgcacgcgggttaccgccgaatcctcgtggatcaccacgccggccgcgcgcgccgcatcggccagaccgcgcgcataggccagcgggtgcaggtgcgcgctgagcggatcgaacatcgcggcacgatagcgcgggctgtccagctgcgcgcgcagggcgtcacggtcccaccactgcatggggtagtcgtagtggcgttgcaggtgctcgcagtggacgcgcagctcccgttcatggcgttcgcggatggcgacgctggcgtggccttccacccaatggcagtcaatgccgtggcgattgatgcgggcgcgcatcgcctgcaccgcgtcgcgcgaccagtcgaacaggtggcgcgcatcatcacgaccgagctgacgctccagttcgtccacctcgcagccatagccgaccagcgcctgcccgccgttgcggccggacgcgccccagccgatccgctgcgcttccagcactaccacgcgccggccacgtgccgccagttccagggctgcggtcaggccggtatagccggcgcccagcaccgcaacgtcggcctgcacattaccctgcagcggggggagtgcgggcggttcgggcaggctggcggcgtaccagctgggcgggaacgcggcgctcactgcaggcctcgcgggtgcagggcgggagggcggagcggggcaggtcgatcggcgttcaccccggtagtttcgccgatgcgtgacggctgtggtgtgacggcaccgacttgccgccttcgccgggcgacgggtaacgtgttggcacgccaaggagttttcccatgcgccgcctgccctgggtgggcctgcccaccgacagcaccgtgctcggccatcaccgtttcgcggtggccggcgagaagtacgtgcgcgcgctggccgaggcggccgaggtgactccggtagtgttgccgagcctgcagccaccgctgccggccggcgactggctgcaggggctcgatggccttctgttgaccggtgcagtcagcaatatcgaaccgcagcactacgaaggtggccgcagctggccaggcaatccacatgacccggcccgcgatgccaatgccttcgcgttgctgcacgaggcactggcgctggacctgccggtgctggcgatctgccgcggcttccaggagttgaacgtcgcgctgggcggcagcctgcatccgcaggttcacgcggtgcctggcctggccgaccatcgcgaagaaccgcaggcgccggtggaggtgcagtatgggccggcgcacgcggtcacgctggccgccgatggctggctggcgcagtggcacggcagtggccgcgcgcaggtgaattcggtacacgggcagggtgtcgcccgcctggcgcaggggctgcaggtcgaggccgtggccgacgatgggctggtcgaagcggcacgcagcctgcaccatcgtttcgtgctcggcgtacagtggcacccggagtggcgtgtcatgcaggcgccgttctatcacgctattttccgtgcgttcggccaggcttgccggcagcaccaacagaaccgactggattcccgatgagttcccgaacgcgcccgcgcaagacggccacgccccccgcaccgcaggaaagcacgctgctgcgctggctgaaggaccggcgcatcaccgaggtggaatgcctggtgccggacatcaccggcaacgcgcgcggcaagatcattcccgccgacaagttctcgcacgactacggcacgcgcctgcctgagggcatcttcgccaccaccgtcaccggcgagttccctgacgattattacgagctgacctcgccgtccgactcggacatgatgctgcgccccgatccggacacggtgcgcatggtgccgtgggcggccgacgccaccgcgcaggtcatccacgattgctacaccaagagcggtgagccgcacgaactggcgccgcgcaacgtgctgcgccgcgtgctggcagcctacgccgagctgggcctgcgcccggtggtggcgccggaactggagttcttcctggtgcagaagaacaccgacccggacttcccgctgctgccaccggccggccgctccgggcgcccggagaccgcgcggcagtcgtactcgatcgatgcggtcaacgagttcgacccgatcctcgacctgatgtacgactacgccgatgcgatgaagctggacgtggacacactgatccacgaatccggcgcggcgcagctggaggtcaacttcacccatgccgatgcgatggacctggccgaccaggtgttcctgttcaagcgcaccatgcgcgaagcggcgatgcgccacggggtgtatgccacgttcctggccaagccgatggaaaacgagccgggcagtgccatgcacatccaccagagcctggtgcgggtgagcgatggcagcaacgtgttcgccggcgagaccgatgccgagggcgagttcagcccggtgttcggccactacctgggcggcctgcagaagtacgcaccgcaggcgatggcgttcttcgcgccgaacgtgaactcctaccgccggctggtgttcggcgaagtctcgccgagcaacgtccactggggcttcgacaaccgcacctgcggcctgcgcgtgccgctggatacgccggagaacatgcgcgtggagagccgtttcgccgggtccgatgccaatccctacctggcgatggccgcgaccctggcctgcggcctgctgggcatccgcgagcggctggcaccggatgcgccggtgaccggcagcgccaaggaactgggctacgacctgccgcgctcgctgggcgaggcgctggacgggctggagcggtgcagcgagctgcaggccctgctgggcgagcgcttctgccgggcctacatctcggtcaagcgcaaggaatacgagacctttttccgcgtcatcagctcgtgggagcgcgagttcctgctgctgaacgtctgagcatccggaatagaaaaatccgccgccggggggtaggctggcacccgtcgccggccccgccggcccccccttcccgcattctggagcacccgatgaagctgcgtatcctcacgctcggcctggcctccgccatgctcgccgcctgtggcggtggcaatggcggcgcgcaggacagccaggtcctgaacgtctacaactacagcgattacatcgccgaggacaccattccgaccttcgagaaggagagcgggatcaaggtgacctacgatgtgttcgacagtgacgagatggtcgagaccaaactgctggccggcaacagcggctatgacgtggtggtgccgaccctgaacttcttcggtcgccagatccaggccggtgtgttcctgccgctggacaagagcaagatcccgaacctggccaacctcgatccggcggtgatgaagcgcatcgccacccaggacccgggcaaccagtacggcgtgccgtacatgatcggcaccaccggcatcggctacaacgtggacatgctgaagcagcgcttcggcggcagcgccgacatcgccaacagctgggacctggtgttcaagccggagaacatcagcaagatgaaggactgcggcgtgaccatcctggacacgccggcggacatgatcccgatcgcactgcattacctgggcctggacccgcacagcggcgacccggccgagctgcagaaggccgccgacctgctgaagtcgatccgcccgtacgtgcagaacttccactcctcgcagtacgtgggttcgctggccaacggcggtacctgcctggtggtcggctggtcgggtgacatcatccaggcccgcgaccgcgccgaggaagccagcaatggcgtgcacgtggcctattcgatcccgaaggaaggcgcaccgcagtggttcgacatgctggcgatcccgaaggacgccaagcatccggaagccgcgtacgccttcatcaactacctgctgcagccgaaggttgccgcggccaacaccaacttcatccactacgccaacccggtgccgaccgcgaccccgctggtggacgaggcgatccgtaccgacccgaccatctacccgccggccgacgtggccgagaagatgttcacctactcgatcaacacgccggagaccgacaagctctacacccggctgtggaccgaggtgaagaccgggcgctaagggctggctggcaggtgggtgccgaccgttggtcggcatgcttttccggcggggccgaccaacggtcggcccccaccagatctgcagatccccccggcccggtgggtgccacccgttgccgtcatatcccctgcagcccccggccgttagaatggcggccgctgtccaccgcccgctcccggagcccccatgcccgttgaagcccagccggtagccgccgtcgtcgacacgaccggtgcgcccggctatctctccattcgtgatttgcgcaaggaattcgacggtttcgtcgccgtcgacgacgtcaatctggacgtgcgcaagggcgagatctttgccctgctcggaggctccggcagcggcaaatcgaccctgctgcgctgcctgggcggcttcgagacgcccaccaagggcagcatcaccgtcgatggccagcgcctggacgcgctgccgccgtaccagcggccggtcaacatgatgttccagtcctatgcgctgttcccgcacatgacggtcgaacagaacattgccttcggcctgaagcaggatggcctgggcaaggacgcgatcagcaagcgcgtcggcgagatgctcgacctggtgcagatgggccacctgggcaagcgcaagccgcaccagctgtccggtggccagcagcagcgcgtggcgctggcgcggtcgctggccaaggggccgaagctgctgctgctggacgagccgatgggcgcgctggacaagaagctgcgctcgcagatgcagctggaactggtcagcatcatcgagtcgtcgggcgtgacctgcgtgatggtcacccacgaccaggaagaagcgatgaccatggccacccgcatcgcggtgatggatgccggctggatccagcaggtcggcaagccggacgaggtctacgagcagccggccaaccgcttcgtcgccgagttcatcggttcggtcaacctgtttgacggggtgatcgacgaggacctgcccgagtacgtgaccgtgcgctcgccgctgttcccggcaccgatctacatcgcccatggcatcacctgttacgaagggcagccggtcgcattcgcgctgcgcccggaaaaggtgatgatcggcaaggacgagccggaagggcacaccaacaaagcgcagggcgtgatcgaggacatcgcctatttcggcagccattcggtctaccacgtgcggctgcccagcggcgccaaggtgctggccaacttcgccaactcgcagcgctgggccagcgacggcctgacctggggtgacagcgtgtgggtgcactggcgcgacaacgacggcgtggtgctgacctcatgagcgtcgccggcctgaagcgctggctgccggggctgcgtgccacggtgatcggcattccgtacctgtggctgctgctgttcttcgcagtgccgttcctgatcgtgctgatgatcagcttctcgctcagccgggtcggctcgccgccgtatacctggctgctgcagtacgccgacggcggcttctcgctgaagctgaacctggagaactacctggcgctgttccgcgattcgatctatgcgcaggcgttcctgagctcgatcaagatcgcggcgatctccaccttcttcaccctgctgatcggctatccgatggcctatgccatcgcgcgcctgtcgccggccgcacgcaatgtggcgatgatgctggtggtgctgccgtcgtggacctcgttcctgatccgcgtgtatgcgtggaaggcaatcctggaccgcaatggcctgctcgaccagttcctgcagttcaccggcctgcagacgctgatgacgtcgatggggctgccgaaactgcagctgatcgatacgccgaccgccgcctatatcggcatcgtctactgctacctgccgttcatggtgctgccgctgtacgccaacctggtcaagcatgaccaccgcctgctggaagcggcctacgacctcggcgccaagccgtggcaggcgttcctgcgcatcacgttgccgctgtcgaaggccggcatcatcgcaggctgcatgctggtgatgatcccggcggtgggtgagttcgtgatcccggaaatgctcggtggttcggagacgctgatggtcggccgccagctgtggaacgagttcttcaacaaccgcaactggccgggcgcttcggcgatggcggtggcgatgatcctgttgctgctggtgccgatcctgctgttcaaccgttcccagcagcgcctgctggaagggaagcaggcatgagcccgcgtaccgccaagggcctggggctgggcgtgctgctgctcggcttcgccttcctgtacctgccgatcctgttgttgatgttctactcgttcaacagctcgcggctggcgatggtctgggccgggttctccacccgcgcctacagcgacctgttcgccgaccgcgcgctgatggacgcgatgtggaccagcctggtggtggcgttctggaccgcctgtaccgccaccgtgctgggtacgctggcggcgatggtgatgacccgcttcaagcgattccgtggcaagccactgttcggcgcgctggtgaccgcgccgctggtgatgccggacgtgatcctgggcttctcgctgatggcgctgctggcatcgatgggcgcgattcccggcttcccggcgcgtggcctggccaccatctggatcgcgcacgtgaccttcaccctctgcttcgtcaccgtggtggtgtcctcgcgcctgcaggaaatggacctgtcgctggaagaagcggcgatggacctgggcgccagccggttgaccgtgttcacccgcatcaccctgcccatcatcgcgccggcgctggtggcgggttggctgctggccttcaccctgtcgctggatgacgtggtggtggccagcttcgtggccacgccgggctcgaccacgctgccgatgaaggtgttcgcttcggtgcgcatgggcatcagtccgaagatcaacgcgttggccacattgctggtgtcggcggtgtcgatcgctgcggtgatcggctggtacatcaacgcccgcgccgagaagcggcgccagcgcgacctgcagctggcgcggcaggacaacggctgagtacacggcctgtcgacagcgccggcaacacccggctcacggacagcggcgcacaatgggggtcttccagatggagatcccccatgaccgtcgagatcatcgacccggccaccggccaggtgacctaccgccatgaactgatgggcgctgctgacatcgagcagcgcctgcaggccgccgccgatgccttccccggctgggccgatcgctcgctgcaggatcgcggcgccgtccttcgccagatcgccgcgcagctgcgcacgcgtcgcgacgacctgcagcaggcgatgacccatgagatgggcaagctcaaggccgaggcgctggccgaggtcgacaagtgcgctgccgcctgcgagtactacgccgaccacgcggccgactatctcaagccgcagctgatcgataccgaagcccagcgcagctacgtgcgttacgagccgatcggctgcgtgttcgcggtgatgccatggaatttcccggtctggcaggtgttccgtttcctggccccggcgttcatggctggcaacgtggccctgctcaagcacgccagcaacgtgccgcagtgcgccgacctgatcctgacggtgtgtcgtgacggaggcctgcctgagggcgtgttcgacgtgctgcacatcgacaacgaccaggctgccgaggtgctgcgcgacgcacgggtgaaggcggtgacgctgaccggcagcgaacgggcagggcgctcgatcgcgtccactgcaggcagccagctgaagaagtcggtgatggagctgggtggcagcgatgccttcgtggtactcgacgatgccgacctcgacaaggccgtggcggcggcggtgaagtcgcgtttcgacaacagcgggcagacctgcattgcggccaagcgcttcatcgtggtcgatgcggtggccgatgacttcacccgacgcttcgttgaagccgcgggccagcgccagtatggcgatcccagtgagcgtggcaccacgctggcgccgatggcccgtgccgatctgcgcgacgaactgcacaagcaggtgcaggccagcgtcgccaagggcgcgcgcgttctggtcggcggcgagcccattgccggcacccatgcgggctatccggcgaccgtgctcgatcaggtcggcccaggcatgcctgcctacgacgaggagctgttcgggccggtggctgcggtgatccgggtcaaggatgaggccgaggcgctgcgcgtggccaacgacacccgcttcggcctgggcggcagcgtgtggacgcgcgacccggtgcgcggcgaagccttcgcgcagcgcatggaatgcggcgccgcgttcgtcaacgccatcgtcaagagcgacgctcggctgccgttcggtggcagcaagcagtccggcttcggccgggagctggccgaccacggcatccacgagttcatgaacatcaagaccgtctacgtggcttgatgccgaagggtagtgccggccactgggcggcattgccctggttgccggccagcggccggcactaccagaagcggggcatgtgccacgaccaacggtcgcggcctaccggattgctgggtatcgacacccccgtgcatggtgggtatcgaccgttggtcgatacgcgctacaaccacttcgcgcgcttgaacaaccggtacaggcccacgcacacaccgcccacgccgacaatcatcagcggatacgaccacggctggctcagctcgggcatgtggctgaagttcatgccgtaccagctggtgatcagcgtcggcgctgccagcagtgcggcccatgcacccaggcgcttgaccgtctcgccctgcgccagcgtcaccagcga

(The sequence listing continues in the following parts.)
